United States Patent Application Publication US 2026/0357256 A1 - sequence listing, part 5

SEQ ID NO: 9 - DNA, 58617616 bp, Homo sapiens (residues 8,684,093-10,855,115 of 58,617,616)
  source 1..58617616: mol_type = genomic DNA
ccctttttgcgtgggagacacagcatatgcgtgttcacgtatgtgctcagatcagggcgtgtaggtgtgggcatgatacctacatgtatacacatgtgtgcttgagcctgggggtgaaggaaccgcctcaagtctctccatatgcccccccacaagccgtgttgtggggctgaagccttgcggaggatgtaggggatgggggagagttgagttccctcccctaaggccactggtgtgccccctcccccatcaccccatctctcccgcctatgaaggacctgggagcagccccagcctcccctctcccccatactgtaaattctgagaaatcctgtcctgtggtttggcctaggccgtcctcgcccgccttcgtccccagcagggctgccctggccactgtcttcctgtcttggggcctgggtttggggtcatggggaaagactaagaacccccgtcccagcctgggttcttagacagaggggagagggctctgccctgcttctcacgactttgctttgcctctctgggcctcagtttcctcttctacagaatggggataattgtagttcctaccccccgagggctgtgggagaagtcgaggaggtgacacccacggggaggtgagagctgagtctggcaggtcctaacgcacctgctacatgctggctgtcactgttattcattttctgcatcttgctttactccagactccacacttttatcctcgctgttcccttacacagaatgtcctcatccctctcctccttggcaaacccaggaataatccaaatcctaactcaaattccatttcctccggaaacaggggagggtggtgagatgagctggatctggcaggcaggaaacctgggatctcaactctgccacggacatgctggatggctttgagcaggccactgtgccacaccgtgactcagtttccccattcgagctctgatgctccagggtttttttttttttgagtctctttttttttgagtctcttttttttttttgagtctcttttttttttgagtctcttttttttttttgagatggagtctcgcactgttgccaggctggagtgcagtggtgcgatctctgctcactgcaacctccccttcgtgggttcaagcgattctcctgcctcagcctcccaagtagctgggattacaggcatgtgccaccatgcctggataatttttgtatttttagtagagatggggtttcaccatgtaggccaggcttgtctcgaactgaggtcagttgatctgcctgccttggcctcccaaagtgctgggattataggcgtgagccattgcacctggcccgcagtgttccttttttttttttttaatgttttcttttttcttgacacatggtcttgctctgtcacccaggcagtggcatgatcatagctcactgcagccttgaactcctggctcaagtgatcctcccacctcagcctcccaagtaactgggactacaggcgtgtgccaccatgccaggctaattttttagcttttgtagagtcagggtcttgctgtgttgctcaggctggttgcaaactcctgagctcaactgattctcctgcctctgcctcccagtgttgggattacaggtataaggcactgcacctggtacttggtgtcaaattgtaaaatgaagccaagcttgcccctgcatctgctcagcctgaattggtggcctcaacatcatctctgctgggttcatcatttccctagtggaataaccctgtcttctccaaatacttcctctcctgggcctcgcaataaacaggggccctctctctctgctcaaacccttgagagagggtgtccaggtcctgggttgctgtctgtctgtctgtctgtctggagggtgagtccaaggctggactcgggggtccgtctttggcacgatctagttgcaacagcagccccaccatctgttgagagcttgctgtgtactaagcatgctaagtccacttcatgcattagtcaaaaagcagttttaaaaatttatgtctggccaggcgcggtggctcacgcctgtaatcccaggactttgggaggccgaggcgagcagatcatttgaggttaggaattcgagatcagcctggccaacatggtgaaacgctgtttctactaaaaatacaaaaattaggctgggtgtggtggcagcgcctgtaatcccagctactcaggaggctgaggtaggagaatcgcttggacccaggaggcagaggttgcagtgagctgagattgcaccaccgcactccagcctgagtgatagagtgagactcagtctccaaaaaaaaaaaaaaaaaaaaaaaaatattatgtctatggaggcatttgcatcataaaacattcaaacaattacattcatatataaactcaaaagattccagcctcccatcttaaaggtgactgaaatttaagagatgtccttctacactgcccagagagcctgcatgagctcattttatcttcataaaactcccctgaagtgagcgctgacatggctgtatttttcaggtgaggctcagagaggtcaggccacttgtctaaggtcacacagcgtgggaggaagctgcctggaacccaggcctgtctgactccaatgcccaaggaagagaggggaagtggcctcccacggaagaggattcttcttggctcattcattcagtcactcaatgatgtttgaatgttttgaatcattcagtcattcaacaaacatgtattgggcatgactgtgtgatgagtgctgttgaaactggggacatagcagtgacacggggggggcctgtcctcatggaactcgtgatagggatggtgacaccattgattaacaagaaattaaacagaaatttgatggtcacaactagggagaagattaggaaggaaaaagaactgtctgggtggacaccagaggaacctaaagcaaacatccatattttaaaatatactcatggccaggcatggtggctcacatctgtaatcccagcactttgggaggctgaggcaggaggattgctggagctgaggaattcgaaaccagcctgggtgacatagtgagaccctatctctacataaaattaaaaaaaaaaatccagatgtgggggcatgtgcctgtagtgccagctactcagagggctgaggtgggaggattgcttgagctgggttggaggaggttataatcatggctgcagtgagccgtgactgtgccactgtacccagcctgggcaacagagtgagaccctgtctcaaaaaaaaatatgtattacatatttatattcacatggttcaaaatgtaaatacttcagttgggcagctatgcaatatatccatcatattaaactttcatggcaggggaggaactaggataaacatgtttaaaaagcctccttaggggtaataatgaaatgaaagctgagaaacactggcatagaagctgccgccgttcaatttttctttttgtgatctttgagatagtctagacattttattttttgctttatcttttgatttttttttttttgagaggagtctcactgtgtcaccaggctggagtgcagtggcacgatctcagctcactgcaatgcccgcctcccgagttcatgcgattcctctgcctcagcctcccgaatagctgggactacaggcacgtgccaccattcctggctaattttttatattttagtagagacggggtttcaccacgttggccaggattgtctcgatctccttatctcatgatctgtctgccttggcttcccaaagtgttgggattacaggcgtgagccactgcacctggcctaaaaaaattattttaatgaaaaacatttaaaaaaatttgttttgtagagatgtgttctcactttgttgcccaagctggtctcgagttctaggctcgagtgactgtctcccctcagcctcccacgattacaggtgtgagctaccactcccagcctattctagactttttaaaaaatttttttttttattgagacagggtcttgctctgttgcccaggctggagggcagaggtgtgatcacggctcactgcagcctcaaactcctgggctcgagccatcctcctgccacaaacccctgagtagctgggattacagaggtgcaccaccacccccggctaatttttgtatttttgtagagactgaggtcccactatgttgcccaggctggtctcgaactcctggcctcaagcagtcttctggcttctgcctcccaaaatgctgggattacaggtgtgagccactgtgtctgatctattctagactttctttccttctttctttctttcttttttctttcttcctttctttcttttctttctttctctctctctctctttctttcttcttttcttttctttctttttttttttttttaaatcttgctccaggctgggcgtgatggatcacgcctgtaatcccagcactttgggaggccgaggcgggtgtgtcatgaggtcaggagatcgagaccatcctgcctaacatggtgagaccccgtctctactaaaaatacaaaaaattagccgggcgtggtgttgggagcctataatcccagctactcgggaggctgaggcaggagaatggcgtgaacccgggaggcggagcttgcagtgagcagagatcgcgccactgcactccaacctgggtgacagagcgagactccgtctcaaaaacaaacaaacaaacaaaaacaacaacaaaaaaaacttgctccaaacctcagaatgttctagacattttaaagcaaatgcccacatctccttttattcctctttttatgttaatgataacatactgttctgggctttcttttttcccaaactatatcttggggatcactccatgtcagaacacagcttgctcatttcttttaaaacccgtgtagtatttctcttctgttggaatacaatttatttaatcggtttgtctggatggtcgcgtgtcttgtttccagtgttttgcggccagaaagcgccgcgtcacggatgatggataactgcattgacgtcatttcgcgtaaaagttgattgtatcagaaggagaggttcctggaagtgccatagctgggccaggtgtttgcggctggaatatgtcctgtatagggttgtaccaatttccctccccactttcaaggcaaaacagtactagtttccccagagtctcaccaacggtgagtattatcaaatcttttgatcgccaatctgatgggttaaaaacgacatcgcagtataggtgtagtgttcatttcccttatgaaattgagcatcttctcctgtgtctaagaaccgtttgtccgtctttcttaatgagctgtgtgttcatatcctttgctaactttttcacggacccttgaggtatttttcctattgattctttctgagagctctttatatatgacagacattattcctttgtgttatgagtttcaagtatttttttccatttgtcattacaaattattatttattattattattattatttttgagacagagtcttgctgtgtcacccaggctggagtgcaatggcttgatctcagctcactgcaacctccgcctcctgggttcaagagattctcctgcctcagcctcctgagtagctgggattacaggcgcctaccaccacacctggctaatttttgtatttttagtagagacaaggtttcaccatgttggccaggctggtctcgaactcctgaccttgtgatccacccacctcggcctcccaaagtgctgggattataggcgggagccaccgccccgacctatttattatttttaagtggtcatttgtcttttgactttgatgagggtgatttttaccttgcggagtttttgggggtgtttacacaaagtcaactgttgtaatcatttcttttgtggcagctgagatttgtggggctacctttgataagatgggagagagagattgagattaatttattttttatttcaatttttttcagtgcttttcaaaccttatttatttattttttttagacagagtctcactctgttacccagcctggagtgcagtggtgctatttcagttcattgcaacttccacttcccgggttcaagagattcttttgccttagcttcctgggtagctgggactacaggcacctgccaccacacccagctaatttttctttttaatagagatggggtttcgccatgttggccaggctggattcgaactcctgacctcaagcgatccacctgccttgggctcccaaagtgctgggattacaggtgtgagccaccatgcctggccgcttttcaaactttaatgtgctgaggaatcccgtgtggattttgttaaaatgactcagtgggtcttgagtaggatctgagattccccttttattttcttttcttcttttcttttcttttcctttcttcccaggatctttctctgtcacacaagctggagtgcagtggtatgattatagctcaccatagcctccaagtcctgggctcaagcaatcctcccgcctcagcctcttgagtagctgggactacaggtgcacaccatcacatctggctaatatttttattttggtagagataggatctcactatgttgcctaggctggtctccaactcctgggctcaagtgatcctcccacctcagcctccctaagtgctgggattacaggcacgagtcaccatgcctggcctaataaaccttatgttacatgataagagaagggataagacaaaggtattttatatacatgtaaacatattcatagcaagttaaggaagacatattggtgacagctacagtcttcatttctgtaactggtcacgtggttatagctgttatttttaactaactttagaacaattcttggtatcaaagtttgcgttcgtttgttcaggctgtaaagtatcccagactgggtggcttaaacaacagaaatgtatagccttacagttctgggggctggaagtccaagttcaaggtgtcagcagggttgattccttctgaggcctctctccttgtagatgactgtcttctccgtgtcttcacatgtttgtccctctgtgtgtgtctatgtcccaatctattctttctctctctttcttttctttttctttctttctttctttctttcctttctttctctctctcttccttccttcctttctccctgtctctttctttctgtttccttccttcctttcttccttccttctttcctttctctctctctttctgtttccttccttcctttcttccttccttcttttctttctttctctctctccttcctccttccctcccttccttccattccttccctccctccctcttccctttctgtctctctttctttctttctccttccttcctttatcccttctttcatttctttctctctccttcctccctccctccctccctcttttctttctttctttctttctttctttctttcttctttctttctttctttcactttctttcttgatggagtctcattctgtcactctttctttctttcgagatggagtctcattctgtcccccaggctggagtgcagtggcacaatctcggctcactgcaatctccgcctcctgggttcaagtgattctctagcctcagcctccagagtagctgggattacaggcatgtgccacaactcctggctaattttttctatatttttaatagagatggggtttcactatgttggccaggctggtcttgaactcctgacttcaagtgatccgcccatctcagcctctgaaagtgctgggattataggcatgagctatcatgcctggccccaatctcttctgatgtccaatcagtcatactggatgaggctgcaccctgaagacctcattttcacttaattattacttgaaagttctaatctccaaatacagtcccattctcaggtactgggggttgggctttcaacatatgaattttggcgggacatagtgcatcccataactggaagagaaaggcaggcagtgtggctggaggtaaaggggattaggagggatgccaaggagaggtttagagagatcagcagaggattcagggccataggaagaacttggtttatttgcacgaaatgaaaaggcataggctggctgagcatggtggatcatgcctgtaatcccagcactctgggaggccgaagcaggaagattgagcccaggagtttgacaagagcctgggcaacatagtgggacctcatctctacaaaaaaacttaaaaaatagctggttgtggtagtacacacctgtagtcccagctactccagaggctgaggtaagaggattacttaagcccagaagttcaaggttacagtcagctatgactgagtcactgcactctagcctgggtaacagaatgagaccctgtttcagaaaagaaaaaaagaaaagaaaagaaaagaaggaaggaagaaaggaatgagggaaggaaggaagaaaggaatgagggaaggaaggaagaaaggaatgagggaaggaaggaagaaaggaatgagggaaggaaggaaggaaggcaggcaggcaagcgactaggatgttcttagcagggaataacatgttctgtgttttgcaaaagccctatgcatacaaggatcttctgagaaggtgactgggacaccaaggaggaggcgccttcagtcattcagctgatccctgggctgggatcaaaaggatagagagaggtggatggctccaggggcattgagaaggaaaggacttgtgaatcggtgtgcaaaacagatatgaaccagttgaaagttcgtgatggaagaaacatgtctatacaagtgaagtgacgaatctgccttctcaagttaaacccttcaaggaggatccggtgggcagacacatcatttatttttcttttctttgagacaaggtcttgctctgttgcccaggctgcagtgcagtggcacaaacacagctcactgcagcctcgaactcctgggctcaagggagcctcccacctctgccaagtagctgggactaaggcgccaccacgcttggctattttttttttttttgagacagactctcgctctgtcacccaggctggagtgcagtgacgtgatcttggctcactgcaacctccacctcccaggtttaagcaattattgtgcctcagcctcctgagcagctgggattacagacagctgtcaccacgcctggttaatttttgtatttttagtaaagacggggtttcaccacgttggccaggctggtttcgaactcctggcctcaggtgatccatctgcctcagcctcccacagtgctgggattataggcgtgagtcactgcgccctgccgaattttttggatttttagtagagatgaggtctggttgtgtttcccaggctggccttaaactcctgagtgcaagtgatcctcccacctttgccaagtggctgggactaaggtgccaccatgcttggctagtctttttgatttttagtgagatgagatctggctatgctgcccaggctggtcttgaactcctgagctcaagcaatcctctcgccttagcttttcgaagtgctggcattacaggtgtgagccaccatgcctggccccatttcttgtttgctgtggtttccttacattttggagcagtactgggcacatagtgggtgatcaatgaatgtttgtgggatcaatgtatgaatgacttaaatcaaaattgaagaaatcggggacccgggaggctgaggcaagaggaaattggggaactgggaggctgaggtgagaggatcacttgagctcaggagttcaagaccagcctggacaacatggccagatctcatatctactaaaaataaaaaagattagccaagtatggtggcagaccctgggggtgtgtgtgggcatggagggggcggtggtcggggtcttgagttcttggtgctcagggttaggggcggatggcaggtggaggcttacctatcagtcataggaggaggtgagatttctaacaacagctttgaggtagtgagctccccatctctgggactgtgtaaatgggaaaagcacttgtccagagagttgtagaggaaaattctgccccagggaaggtctggagctgagggaacagggaacctcagtctgctctaaatgaggattcattgggtttcccaggagcccaggggtgacagggtttctgcatctccctcacttcctgtggtatctgagactcagcctgtctcacataccttctgtgccttgtggctggagcttggagtgggtctcacttggggtctgggtgtctggcttgctccaggcatcaacgttctgaattccatgcccttgagcttggaggtgctgccccctggtgtggaggagaagaaatgtctcctcaacaccccatgacctcctggtaggggattctgtgcattctataggttgagtctaccttggggagagcccggctgggtcagagcgggtccaaccctgaatatttgtgatctggagatcttggcctgtcagtgggggccccccacccctgagctgaggatctcacactaacccagggtgagcctggagccacagcctactctccaggacacagtgggacagggtgggtggggagtttctcacggctgacttggagggtaggggaggtcgcctcactgctccacagataaatgcatttccactctggaaaattccatccataagcatggttcttgcaggtgagtcagacggagaggaagagagagagagagagagagagagagagagagagagagagaggcaggtagagacagagacacacacgctggtttagggagaaagaaacacatcaagtgaggccaggtgtggtggctcacgcctggaatcccagcactttgggaggcaggggtggatggatcgcttgagcccaggaattggagaccagcctgagcaacatggtgaaaccccatctctactaaaaatacaaaaaattagccagatgtggtggcatgcacctgcagtcccagctattcgggaggctgaggtgggaggatcacctgagctgggggaggctgaggctgcagcgagtcatgatcatgcggctgcactccagatggggtgacagagcgagaccctgtctcaaaaacaaacaaacaaacaaacaaacaaacaaacaaacaaacacagcaactgagcacaaaactcctgaaaagttagcaatgcacagaaagacacagcaggagcctacagatcctgtgagtgatgctccttaaatagtgactggctgaaagaatgaatgaatgagtgaatgaatgatttcttgggctgagcaaaaagaggacttgacacagacatggataacctccagcagctcctgtctactgtgttgataaactgggggttgtgtccagactgctggctggaggtccggatgtccttcaggctgggctagggggcatgaagacagagggtcctacctccagaggggacccaggacgctcgccatcctgagaggctggattccccctcccgaccctggcagggacagggtggggtgggagaggcctcctcgagcatcctcagtgcacaacccagagaaagctcatgggactgagaggaacaggctgagagatggacttttaatggaatggagggagatggggatgcatagcctgggacacatgggccctgggtgcctgtgctggggcgagtgagagagccagtgtccaggtgaagctccttgcctggggcatctgccccatgactgcagtggactgggaagcccttaagagtatcactacccactgatgtccaagtcttgcttgatagtatggtgtccagggaatggtcttggggagtgggttccggagagcctgtgagagttccagggcggggtgcacatcatggggtgcctgggagggtatctttgggagagtctgtggaggagggagttgggaggtgttggaacacagaggagggcctagggtctagtggggtcgttataggatgctcatggggacctgagcatgacatttgggaggctggctctttcctgggaggagctgggggctgaggaagagggtcaggaagtgtcctgtgagagagaacatttgggagtatttcgggcggagacacagtgcaagaaagtggtcttagagcaacaggggtccaccctggggtttcgggggtggatctcagaatgatgtgttttgggaagatggatgggggatgggtgatgggaccacctggtcagtggaggtggggccaggggaggtctgggggaaaaatcctgaggggaggggagagttctgcagggatgatggatgccaggggcatcccatggtgggaccattgtaggagaaacccttgaaagtcagaattcaggtctctgtgatggatctggggggtcagcacttgtggggggcatcctaggggaaaccaatgaagaggtggatttggggtgctgagaaccaggggtatcttgacaagtggaatcttgacaagtggaatttaagagtgtgtttggggggattagaaataaggggaagattatgggggtgcacccaggggttggagcactcacgggaagattctgggaggaggttggagcattccggggtagagactgggttggggggtccctgaggagcatactaaggggggtggcagtttggagggtttggagcccaggggtattttgggatgctatatcaaaagcaatagataatggggtgagattagggagtcagtatttgaggatgtcttgggcacatagtgggtaattaatgaatgtatgtgggatcaatgcatgaatcacttaaactagaaatggaaggaattgggtatgtggcttgggtatgtggcagaccctaggggtgtgtgtgggcatggggtgggtggtcagaggctttcatgttcttcatgtttggggttgggggcaggtgccaggtggaggcttatctatgactcataggaggaggtgatatttctaacaatagccttgaggtagtgaactccccatctctgggagtgtgtaaatgggaagggcacttgtcagaggtggtctggggagggggtgtcccaacccaagggtgcctggggaggggcacagatcacaggaggatgggttgacaggattagaacttagtggtctgttgggagttattcatggggaaggtgggtttagggggtcaggattggggtgtctcagggcatgcatcacaggaggtgagttaggtcagcctgtggggcgaggtgcccaggagtggatggggcaggccctggaggaaggacaggacagagccggctgtagcagaggctttactgcccccacgccctccccagctctgccctggtcagtagcatttgcggtacacgatatagggaccctgttcctcgtactgctcccgcaggacccagcaggactggaaggcgcgcagggaggccaggatggagcccccgatccatacggagaaattcctggtgggctgggcagccaccaccacgtgggtctcggctggcagagcgcgcagcagctctgcccggaagcgaccctcgaagccggtgaagagcgaggacccaccgcagagaagcacgttttgggccaagtccgcgcgcatctccagtgacaacttgcggagactctgcttggccatggtggagaggccgacgggtgacagccccgggacctctggggggttgaacagcagctccggacactggaacagctccttgcccagggtgaccgtgcgcccatcgggcagcttcagagtccgcttgtactcctgctccggccgggcctgctccttctggaagtcggaggccacgtagcaatagtggtgcttaatgttctccactaggtccaggtcctgctgtcccaggggcaggccggcctggagcagcatctccgccaggaaggcggtcaggttgttgcccgccaggtccagacgctccgtggcgtggagcaggttgtagccctggaagacgggcactgtgtaggtgaccccgtgtcccgtgtccaccaccagcccgctgacacgaccgtgggcgtagacagacagcaccgactgcgatgccacgtacatggctggggagcgcagcgactcgaaggccacctccactagcttctcgcggttggtggccgggctgaagggtgggtcggagaacagcagcgggtggtcgtgggtggccactcggaggtcgtgctccagcaggtggcgccagatgagctcggcggcatcccagtccacgacgatgccgctgcgcaggggttgcaccagcgtcagctctgggagcacgcgggctgcctcgccgatgaacgtctgcagcccggactgccccgaggtggcgggtttcttgggctggcagcccaggatggtggccacggtgtaggtggggctggcctgcccagcaaaacctaccttacaggtgcctgtgcccatgtcaataaccaccgcgccggtctttggtggcagcctgtcggccaccatgccgggggagtcccgctgcaggggcttgttcaccacgttgggactggggtttgggccgggcctgggggcctccagggaggactgggattccgaggacttggggcgacttgcatccatggttgcgggacgccaggtgagggggcttttcctctggggttggggttgcggggagaagaggttgaggcccggccagtggggagggcaggcagacagggggaggggtgggcccgcaatctatgacgtcacggtgccccttcagtcttcttaagacatcacaatgcagccaagaggatgggtccctgcccagccctgcctgcccaaaggctgtcatctcttctctgaagagccaaatttggaggaggagatgagcatctcagagcagggccctcttaacacatttctgtcggatgcgctagaagctaatacgatggcacctggtttttgagaaaagacaagctttttgttgcatgtcaacccactgggagctaggaatccagcacaagtctgtttctcagctggctttaaggcagtaattttattagaaaagttctggggccgggggctgtggctcacacctgtaatcccagcactttgggagaccgaggtgggagatcacctgaggtcaggagttcgagaccagcctggccaacatggtgaaacccgtctctaccaaaaaatacaaaaattagcctggcatggtggcgcatgcctgtggtcccagctactggggaggctgaggcaggagaatcacttgaacccaggaggtggaggttgaagtgaaccaagatcatgccaccgcactccaggctgggggatggagtgagactctgtctcaaaagaaaaagaaaataaaagaaaaaaaattagccaggcatggtggcacatgcctgtagtcccagctactagggaggctgaggcaggagaatctcttgaacccgggaggtggaggttgcagcgagccaagatcatgctactgcactccagcctgtatgacagagcgagactcatctcaaaacaaacaaacaaacaaacaaagaaacaaacaaaaaaccctcataagtggaaggcatttcagcaagttgtttcttttttgatctgccattctgcaagctcaaacatttctttggggcatggtttcactaaaaacatgcaaaattggtttctctaactctttgggccacgctttcaggaagacccaggaatcctcctctgggtacctcgccatgaagctatttacagcctagtggcagagagcttgccacaggcctccctagaatattagaatattcctcctcagaatattaattagaaggtggggcgggctagcatggcttcctggtttccaaatggagacagaggccagccttggttggggatggagagaggcagggagagacaggaacacccctgtcctagattctttgcttcctctgctatattcactgcctgaatcattctccctgtcccattcctgccaagaaggaatttgcctcttcaaatctcagtctgatgccacctcctcctggaagccaaccctgatttctactctgtactccaactagatgagggatgggggaagtctgccttctctccaggggttgttacctgcttcctcctggcaggagaggggctcagtgagatacaagaaggggtttcagtatagataaaaggggagagggtgcatttgggaggaaggaattatctcaacaataaatagcaggcttcaaaatgcattaggagagttgcttcaagaccatggctgtttttggtgatatcagatatcacctgttagttaaagcaaataaaaacgtttttcttagtgtatgttcatgcatgtggtggtagaaatcaccaggaatagtgctagtgaatgtcttatgggatatctaaatgaaagaggtttaattttctagttgtgtctagatttattactctgccagagtgtggtttattgagcattttaattaattattgatttactggtatgtgtggtctaatccatgcttttggaaatatttactcagcaatttattgagggtctgttttttggactgttcacaacaaccagaaatacactaagtgataacactttattgttttcaatttttttttgagactgggtcttgctatattgtccaggctggagtgtagtggtgcaatcactgctcactgcagcctccttaacctcgtggtctcaagcaatcctcccacttcagcctccaaagtagctgggactataggcatgtgctactatctccggataagtttttaattttttgtagaaatggggtcttgctatgttgcccaggctgatcttgagctcctgggctcaagtgatcctcctgtcttaacctcccaaagtgctgggatgacagggattagccaccatgcctggcctttcttcattttctgattttaaaacatggcaacttcttatggcaactttatgacttaggaatgggtactatgtctatttttttgatggaaaagaagctcagagaggtcaagtgattgttcaaagtcacaactggtatgagacagaggcaggagttgagcctacatctttgacttacttcagtggctgactgtgagtctgggaaattgtgaaatctaagatccacccaaaacagccaggcatggtggctcacatctgtagtccgagatactagggatgctgaggtgggaggatcacctgagcccaggagttggaggctgcagtgagccaagatcacaccactgcacccagcctgggtgacagagcgagaccctgtctcaaggaacaaacaaacaaacaaacatacaaacaaacaagaaaaacccactaaaaatagaacagaaacaaaggttgggactctgtgagcctccatttcctctcttcttggataaaatgaggataccttgtctggcacttaatagatgctagcttctgagatactgaagcaacaatataggaaaatatcgtgattataggcaacaaagccatgatgtgcctaaggccacagatccggggccaggcttctggaatttaagccctgactcctctgcttaatagctgaggcaaactactaactgtgactcagtatccccatttgcaaaatgggagtaataatagtgccaccttcaaagtgcagctatgaggatgggcaagttattgttttctagtgtttaggtcagtggttcacacatagtaagtgctatgtgagggtttgttacatcaatgataagtactggctggacgcggtggctcacgcctgtaatcccagcactttgggaggctgtggtgggtggatcacctggaggtcaggagttggagatcagtctgaccaacatggagaaaccccgtctctactaaaaacacaaaaattagctgggcgtggtggcacatgcctgtaatcccggctactcgggaggctgaggcaggataattgcttgaacccgggaggcggaggttgcagtgagctgagatcgcgccactgcactccagcctgggcgacagagcgagattctgtctcaaaaaaaaaaaaacaaaaaaccaaaaaaacttcctaggtcagcctgctgtgcctttagtgccgagaaccactgatttcttgagcagtcttgtcacaaaccctggagaacaaaaaggaatgctgtattcatcgtctttttattctgtcctttctaggcaaaagaaatgctgtattcaccgtctttttattctgttctttcgaggctggggcattttggagccttgctgagcctgcagagactgctcctcctgactacccaacgcttagagatagtcaataatttgtttgcaacttcaggtttcctgtgcaaacaaacaaatccagagcccatactccccagccacctccttgtcaggctcttgcactccagcccactctcctcttgccccagtcaccccagataaccaggaacagctcccacaccccagagcctactgaaatgattcatattagccaattctaagcctgctcaccctgccttgcctgttccttcctggggaaaccacaataaaatctcttgcccacagtttctctcactccctttgcttcctgaccacccatggtgctttccccatgtcccgcccccgccacccaccccccacgcactgcccccggccctatggcatggtgtgcctcctcctcttagaaactgtagtaagttatctttcaattgcaatcatctcccaatctcttggccttgccatatgtgcataataataaaacctacatttaattttttttttttaagacagagtctctcccgtcacccaggctggagtgcagtggcatgatctcggctcactgcaacttctgcatcctggattcaagcaattctcatgcctcagcctcccaagtagctgagattacaggcacccgccaccatgcccagctaattatcatatttttggtagagataggatttctccatgttggccaggctggtctcgaactcctgacctcaggtgatctgcccacctcagcccccaaagtgctgggattacagacacacgccaccacgcccagcctaagttttgtatttttagtagagacagggtttctccatgttggccaggctggtctcgaactcctggcctcaagtgatccacctgccttggcctcctaaagtgctgggattacaggcatgagccaccgcaccccgccaaaacctacatttaaaacagaaggcttcactcattcttcttacttgaaatgctcagggatgtttaattatccaacacttcttggatgttcttggcaaacctccttccttcattcctgcagttaattaaaaccgaacctaacagttttttcatgctctcctggggccaattttagatatagagcacgtgactcccactgcaattaatttttttctctgcagttgaaacgggaggctggaagaggatttgaatgtaacgcctttatcccttgacagtagctcaatactgcttgagtgaagatggtgttagtgggttaagcacttggaaacagttcttatctcagacaggcaaccaaaagcccccgtcctttatgccttccagctactgttttgtctaggtttacaaaagtgattttaggccgggcgcagtggctcatgcctgtaatcccagcattttgggaggctgaggcaggcagatcatttgaggtcaggagttcgagaccagcctgaccaacatggtgaaacccccgtctctactaaaaatacaaaaaaattagctggatgtggtggtgcctgcctgtagtcccagctactccagaggttgaggcaggagaatggcttgaacccgggaggtgaaggttgcagtgagctgagatcgtgccagtgcactacagcctgggcaacagagtgagactctgtctcgaataaaacacacacacacacacaaaacaaacaacaaaaaaagcgattttatcctggtgttccctgaaagggctaaatatgcaaagtgggccccgaatgctgaaagacctgagaaccaaagaatgaggcagacaaatccagtctgtaggtaaagattgtttgattgggggaaattacagacagaagtgtggtcttgcgcggctgcaagacaggtaggtctctgcactgttactcctcagacccaaggcttatataccatagggaaagactatatttgctcaagcaagacaaagaaaggcagccctccaaaaaaggcaggagaactacatgcatcataacttataatttgtgctatagtgacatcaaagttgacatgttcttacactaaggacagtattaaataaagttctgatgggtgtctctcactgagtatgctcatgggtatgccttggtgggctcagaacaaggtcaggaaagacatgtgacttttacttttgtgcaaaaaaacaggatacgtaggactgtgcaatgctggaggctgtcttcccagcctacggatcaaatacctgggaatttcactgtatcactctttttttctttttttttgtttttgagatagagtctcactctgtcacccaggctggagtgcagtggcaccatcttggttcactgcaatgtctgcctcccgggttcaagcgatgatcatgcctcagcctcccgagtaactggattacaggcacctgccagcacgcctggctaatttttgtatttttagtagagaacgggtttcatcatgttgaccaggctggtctcgaactcctgacctcaggtgatccgcgcccagccttcatagtatctctcaatcttaagtccacagcagtgtgtattttggggaaaggcagggattcagacgtgatacagacagttccaccctcatgtgtgtgtcctcccatcacctgtgttcaggtgttattggtatcagcagtgagttttggatagttgtgttggtgagagactgaatctgtttcctccccaaagcagcattctcggttggtgtgtggaagttgcagataccaggtgtggagacaaaagtgattccatctcggatgataatctgctgggttgacttctgattagcctcagttccatgaatgcctcctgctccctaccttatttatttatttattttgagaaggaatcttgctcttgtcactcaggctggagtgcaatggcacaatcctggctcactgcaacctccgcctcccgggttcaagcgattctcctgcctcagccaccagagcagctgggattacaggcgcccgccaccacatctggctaatttttgtatttttagtagagatggggtttcgccatgttggccaggctggtctcaaactcctggcctcaagtgatccacctgcctcggcttcccaaagtgttgggattacaggcatgagtcaccgtgccctgcctctactttatttaatactgtctttagtgtaagaacatgtcaaccttgatgtcactatagcacaaattataagctatgactcatgtagttctcttgccttttttggagggctgcctttttttgtcttgcttgagcagatataccctttctctatggtatataagccttgggcctggggagtaacagtgcagagatctacctgtcttgtggcctcccaagaccatgcttctgtctgtaatttcccccaatcaaacaatctttacctacagactggatttgtctgcctcattctttggttctcaggtctttcagcatttggggtccactttgcatatttagccctttcagggaacaccaggataaaatcacttttgttagacacagaaaaaatagggcccggaagacaccaaggaggagggcttgtggttgcatgtctgagataagaactgtttccaagaatttctaaaaaccccacaagaaatttcttcctgttcttcacacatcacctgcattgcagacttgcatgttttacacgtgtgcttatgtttctatgacaagatttatcaccaggcattctttaggagtgcagtaattcagagaaggtgctcttggaaggacgtttgcccggtaatagcatctccactaacgaactgatgacaactctggctttgagcctctggaaccaatgaactctgtttccaagcagtttacaagaacttctccctttttgcctataagacctttcctttacccttccctcactggatgcactcatgctttgccatttggtgaatcctggattagaatcttcttttcctgctcctgaataaattcaacatatttggagatagttttcatgcatatatatgtatagacataaccttggtatatatatgtatagacataaccttggtatatatatgtatagatataaccttggtatatatatgtatagatataaccttggtatatatgtatagatataaccttattatctatacatatatctgaaaactctatataaaataaattatatgtgagaaactatatataactgtatatattatattatatattatatataatgtatatagttctgtatatattgtatatataatatatgtagttctatatataatatataatatgtattataacatatataatatgtattataacatatattatgtattataacatatattatatattataacatatataatatacaatatataatatatgttataatatataatatatgttataatatattatatataatatatacagaactttatatattatatacaatatataatataatatacacagttatatatagcttctcacatatataaccatgtaactatatattatatataatgtattatataatgtaattatgtaatgtacattataatatatagtacatatataatgtaactatataataattatatataatatatagttgcatggttatgtatgtgagaaactatatatatgtgagaaactatatataatgtatattatatattatatatgatataataattttatataatataatataattttatattatataatatataagatatataataatatatataattatataatatataatacatataattatataatatatttttatattatataatatataatacatataatatataatatattttatattatatattatataatatatataatatattatataatatataatatatataatatattatataatatattatataatatatttttatattatataatatataatataatatataacatatataatatataatatataacatataacatatataatatataatatatagttctaaatatagttgtatataatatataatataatatatagttctaaatataattacatattatatataatatatagtataatatatacagttatatatagtttctcacatatagtttgttttatatagagttttcatatatatagataataaggttatatctatacatacataacaaggttatatctatacatatatatacatgaaaactatctccaaatatgttgaatatagttatatatagtttgtcacatatatatgagaaactatacattatgtataaatatatagctgtaaatatatcatatatgttatgtaatattatatatattattatatattatgttcttatatatgtacatataatatgatatatacagttacatataatatatatgagaaactatattacattatatataatatatagttacatggttatttatatagtttctcatatatagtttacttttatatatagttttcatatacatgtttagatataaccatttatagtttcttatataaactatgtatatatataaggttatatctatacatacatatatatatgcaaaaagtatctccaaatatgttgaatttgttcaggaatggaaaaagaggattataatccagcatgtctatttatatatcttatatctgtatatgagaaactatatatatatgtatatgagaaaaataatatatatttatgtacatgaaacatgatatatatttgaaatatgatacatgatatatattttttattattatacttcaagttctagggtacatgtgcacaacgtgcaggtttgttacatgtgtatacatgtgccatgttggtgtggtgcacccattaactcgtcatttataccaggtatatctgccagtgctatccctctccccttcccccaccccatgacaggccctggtgtgtggtgctccccaccctgtgtccaagtgttctcattgttcagttcccacctatgagtgagaacatgacgtgtttggttttctgtccttgagatagtttgctcagaatgatggttgccagcttcatccatgtccctacgaaggacatgaactcatcctttcttatggctgcatagtattccatggtgtatatgtgccacattttcttaatccagtctatcattgatggacatttgggttggtaccaagtctttgctattgtgaatagtgccgcaataaacatacgtgtgcatgtgtctttacagcagcatgatttataatcctttgggtatatacccagcaatgggatggctgggtcaaatggtatttctagttctagatccttgaggaatcgccacactgacttccacaatgattgaactagtttacagtcccaccaacagtgtaaaagcgttcctatttctccacatcctctccagaccctgttgtttcctgactttttaatgatcgccgttctaactggtgtgtgagatggtatctcattgtggttttgatttgcatttctctgatggccagtgatgatgagcattttttcatgtgtctgttggctgcataaatgtattcttttgagaagtgtctgctcatatcctttgcccactttttgatggggttgtttgtttttttcttgtaaattcgtttaagttctttgtagcttctggatattagccctttgtcagatgggtacattgcaaaaattttctcccattctgtaggttgcctgttcactctgatggtagtttcttttgctgtgcagaagctgtttagtttaattagatcccatttctcaattttggcttttgttgccattgcttttggtgttttagtcatgaagtccttgcccatgcctatgtcctgaatggtattgcttaggttttcttctagggtttttatggttttagttgtgacatttaagtctttactccatcttgaattaatttttgtgtaaggaagggatccagtttcagctttctacatatggctagccagtttatatatatatatcactttaatataaataatatattttatatacatgaaatattatatatatttgatatatgatacatgatatatatttgatatgagattatttacatatatgagaaatgatatatatttatatttaatgtataagcttatgtgtttatatttatataacaatacaaatatatagtataaatatgtattgaatatattcttaaatatagtcttatttctcatacatatgagaaactctatctatctatctatctatctataaggttatatatatatataaagttgcaaagtgttaaagaacagagcatggggatccattcttggttaggtcatcgtcatggagaaataactgaatcaccttgaccattagccttcttttgacctcttctttcactagagtgttaggatttgggcattgttaggttattcggagccctggtttgaattcctaaatcccagaattgtgtttcccactaagcaggggttggaccatctgtatacggagccattaaccacacacaacagccagggatggtgagagagccccagctttcctcactctgttgaaggaagcatgtcttggagttgttcatctcttctgcacttttgcttctctttccatgacttgatatctgcctttaataggttcctgcgctttcaggttaaatgcccattccttggacttaacccaaggatatattggctgctttggcctgatgctcagcactgccaggtatgaacagcaccgtgggtgacattggaaagcagcagaggctttctcagccctgagataaacttcagttctgacctgctcgggaaaaggctatgagatgcagcgaaagagaaacatcttcctcaaaagataagctgaagttggccaggtgccgtggctcacgcctgtaatcccagcactttgggaggctaaggcgggcagatcacctgaggtcaggagtttgagactagcctggccaacatggggaaaccccgtctgtactaaaaatacaaaaataagcctggcgtgatgacgcatgcccatagtcccagctactcaggaggctgaggcaggagaatcgctcgaacctgggaggtggaggttgcagtgagctgagatcacgccactgcactccagcctgggagacagagcgagactccgactcaaaaaaaaaaaaaaaagataagctgaagtcaaaaccacagtgagatgagttgccaccttatcctcattaggatgtctactgtaaaaaactcccccaaaccaaaaaaaaccacaagtgttggcaaagatgcggagaaatggaaacccttgtgcatgttggtggaaatagaaaatggtgcaaatatgatggaaaacgtatggtggtttctcaaaaatttaaaaattgaattaccatatgatccagcaattttacttctgggcatatacccaaaagaattggaagtaggatcttaaggagatgtttgtatacctatgttcataacagcgttattcacagtagccaaaatgtggaagaaacccaaaagtccattgatagataaaaggataaacaggcggggcacagtggctcacgcctgtaatcccagcactttgagaggccaaggcgggcagatcacctgaggtcaggagttcgagaccagcctggccaacatggtgaaactcagtctgtactaaaaatacaaaaattagctgggcatggtggtgggcgcctgtaatcccagctacttgggaggctgaggcaggagaatggcttgaacccaggagatggggattgcagtgagccaagattggccgttgcactccagcctgggtgacagagtgagactttctcaaaaaaaaaaaaaaaaaaaaaaggataaagaaatgtgctatacttatacagtgaaatattattcagccttaaaaaggaaggaaattctgctcatgcaaagccatgaataaatcttgaggacatcatgcaaagtgaaataagccagtcacaaaaagtcaaatactgtaggattccacttatacgaggtatctacagtggtcaaactcatagaaacagaaggttgaatagcaggtgccagaggctggagttgcggaggtgaatagggagttatttaacaggtacagagtttcagttttgcaagatggaaaagttccagagatttgtggctcaacaacataagtatagttaacattactgaactgtacatttacaggtggttatgatggtaaattttatgtttgtgtactttactatttgaaaaacaatctgggaaagaagaaaatgttaacaggccagaggcaaggtagaagtggattgcttacaagcctcacagataatgacagtagcagggtacggtggtgtgcacctgtagtcccagctactcaggaagctaaagttgaaggacagcttgattccagcaatttgaatccagactgggcaacatagcaagaccccatctctaaaaaaagatagtaataatatcaaacactgttacagcctcaatgttcccagttactttctaagtgggttacaactgttagcccatttaatctttattctcacattacaggggaggaaaaccaggcacagaggtattaagcagcttgcctggaatctaatagcttatgaagagtagaatcaaattttcaacccaagaagtctgcttccaagtcttcattcttgccaagtatgctacacttccagatacacacaattgcaacataaaccaagttgaacattaatggattctttaaacaaggtcaggtgaatctgtcaggaagagtgtcaggtgggagaaaccaggatggtcttcgctgagaaggtggcattgcaggtagtctttgatggctggccccattttgaaaggtgctggcaatggtggggtgggcgagtggtagaagaagaaggtgtgaaggaagagaaaggaactttattgtgtgtcggtgatattcaaggcccttgaggctgttatttctgcaaatatttatgctttggtgacacaatgggggtgtccaagataaaagacctatagttttcttaaagtatctttttctggttgtagtgtcagggtaattctggctttgtaaaatgagtttggaagtgttcactcctctccattttgtttttttaaataagagtttgagaaggactgacattaattcttctgtacatttgtttggtagaattcatcaataaagccatttggtcctgggcttttctttccttttttttgagatggagtctcgctctgtcgccctggctggagtgcagtggcgtgatcttggctcactgcaagctccgcctcctgggttcatgccattctcctgcctcagcctcctgagtagctgggactacaggcgcctgccaccatgcccggctaattttttttgtatttttggtagagacggggtttcaccgttttagccaggatagtctcgatctcttgactttgtgatccacccgcctcggcctcccaaagtgctgggattacaggcgtgagccaccgggcccggccaggtcctgggcttttcttggttataaggtttttggttactgattcaatatccttactagtcatatatctattcagattttctgcatcttcatgattcagtcttggcaggtcatgcatttctagaaatgtatcaatttcttctaggttatctaatttgttgttatataattgttcatagtagtctcttatgacactttttatttctgtgacctcagttgtaatgtctcttctttcatttctgattttatttatttgcatcttctatcttttttcttaggtagtctagccaaagatttgccagttttgtccatcttttcaaaaaacaacttttagtttcattaatttttctattgtttttctgttttatttatttctttttttttttttttttttgagacagagtctcactttgtcacacaggctggagtacagtggcacaaccttgcctcactgcaacctccgcctcctgggttcaaaccattcttctgcctcagcctcccgagcaactggcattacaggtgcctgccaccacgcctggctaatttttgtatttttagtagagacggggtttttccatggtggtcaggctggtcttgaactcctgacctcaggtgatctgcctgcctcgacctcccaaagtgctgggattacaggcgtcagccaccatgctcttccaaatttttttttttaaaaccctgggccgcacaacatgaggatgaactgagagcggcggccgtgcctccagccatctctggctgcgtatctaatttatttctgctccaatctccgttatttcctttcttctgctaacttttggcttgtttttctttttctagttctagttccttgaggcttaaagttaggtcatttatttgagattttccctcatttttaatgtagtaatttatcactctaaacttccctcttcgtctgcttttgtcgtatcccataaattttagtattttgtgttttcattttcattgtctcaagatattttctattttcccttttgatttattcttttttgagatggagtttcgctcttgtcgcccaggctggagtgcagtggcatgatctcggctcactgcaacctccctctcctgggttcaagcgattcttatgccccatcctcccaagtagttgggactacaggcacctgccaccacacccagctaacttttttttgtatttagtagagacgtggtttcaccatgttggtcaggctggtctcgaactcctgacctcaggtgatccacccacctcagcctcccaaagtgctgggattacaggcgtgagccacctcactgggccctttttgatttattctttgacccattggttgttcgaaggcatattgtttaacttccacatatttgtgaaatgttcagttttctttctgctactgacttctagtttcattgcattgagattgcaaaggatacttgacaacgatttccaccttcttaaatgtgttacgttgtgttttgtgagataacgtgtgatctatgctggagaacgtctcacatgtacctaagaagaacgtgtatcctgctattgttggagagaatgttctgtatatgtctgttaggtccatttgctctttagtatcgttcaagtgctttgtttccatattgatcttttgtctgaatgttctatccattattgaagatggaatgctgaaattccctactcttattgtgttgctttctatttatcttttcagttctgtcaatgtttgcttcatatatttgggtggtctggtgctgagtgtgtatatatttatacgtattatatcttcttggatgagatgatgcttttatcattatacaatgtccttgatttttgatttaaagtctattttgtctgatgcaagtatggctatctttgctgtgttttggttaccgtttgcatggaatattttttttctatcctttcattttcagcctattgtgtttctttaaagctaaagtgggtctcttgtagacagcaatacttgagtcttaaaaaatatgctcagctactgtatgtcttttggttgaagagtttaatccatttacatttaaagtaactattgatagggaaggactagggcaattttgttcattgttttctgtcttgtagtttttcatctcttttcctctcttgctatctttctttgtatttcattgatttttttttatggtgacatgttttgattttttttctcattttcttttgtgtatctactataagtattttctttgtggctaaaatgaaactcctataaatatatttataacaatctattttaaactgataacttcaatcacatataaaaactctacacttttactccccctagattttgttattgatgttaaaaattcagtcttttctatattgcatattcattaatatatttttgaagttatagtttttaaaaatatttttgtcttaaaacttctatgccagaatgaatagtgatttaaacactactattgtagcattttcacctgatggactctttcagcatttcttgtaaggcagaactagtggtaatgaactccctcagcttttgattatatagaaaagtctttattcagttatgaagggtagctttgccagatataagattcttggttggcattttttcttttaatcctttgactatatcatcttactcccttctgggctgcaagatttctgcagagaaatcctctaatagttttatgcaggttcccttgtatgaaatgagttgcctttctctcactgctttcaaaaatctcttggtctttagcttttgataatttgattatgtgtcttggtgtggatttctttgggtttatcctagttgaagtctattaggctacttggatctggatgtccatttcctgtctcaggtttggaaggtttttagccattatttctttaaagaaactatctgctatttttctctcttttttctaataatctcatgatgtgtatattgttcggcttgacagtgtcacataagtcccttaaggtttcttcactctctttcatttttttttctttttgttcctctgattggatatgttcaaatgacctgattatttcttctgcttgatcaaatctactattgaacccctctattgaattttttagttcagttactatattctttagcaccataaatactatttggttgaaaactgtttaaatctctttattgatattttaattttgttcatgcatcattttcttgagctcatagaacacctttatgatggttattttgaactctttttcaggtaatttacctcaattatttagaatccgtttctggagatttagtttcctttttggggaaccatctttcctttttttaattttatcttattattattacacttttaagttttagggtacatgtgcacaatgtgcaggtttgttacatatgtatacatgtgtcatgttggtgtgctgcacccattaactcgtcatttagcattaggtatatctcctaatgctatccctccccactccccccaccccacaacagtccccaaagtgtgatgttccccttcctgtgtccatgtgttctcattgttcaattcccacctatgggtgagaacatgcggtgtttggttttttgtccttgctatagtttgctgagaatgatggtttccagtttcatccatgtccctacaaaggacaggaactcttcatttttggtggctgcacagtattccacgctgtatatgtgccacattttcttaatccagtctatcgttgttggacatttgggttggttccaagtctttgctattgtgaatagtgccgcaataaacatacatgtgcatgtgtctttatagcagcatgatttataatccttcgggtatatacccagtaatgggatggctgggtcaaatggtatttctagttctagatccctgaggaatcgccacactgacttccacaatggttgaactagtttacagtcccaccaacagtgtaaaagtgttcctatttctccacatcctcttcagcacctgttgtttcctgactttttaatgatcgccattctaactggcgtgagatggtatctcattgtggtttttatttgcatttctctgatggccagcgacgatgagcattttttcatgtgttttttggctgcataaatgtcttcttttgagaagtgtctgctcatatcctttgcccactttttgatggggttgtttgtttttttcttgtaaatttgtttgagttcattgtagattctggatattagccctttgtcagatgagtaggttgtgaaaattttctcccattttgtaggttgcctgttcactctgatggtagtttcttttgctgtgcagaagctctttagtttaattagatcccatttctcaattttggcttttgttgccattgcttttggtgttttagacatgaagtccttgcccatgcctatgtcctgaatgttatcaagctacctgacttcaaactatactacaaggctacagtaaccaaaacagcatggtactggtaccaaaacagagatatagatcaatggaacagaacagagccctcagaaataatgccgcatatctacaaccatctgatctttgacaaacctgacaaaaacaagcaacggggaaaggattccctatttaataaatggtgctgggaaaactggctagccatatgtagaaagctgaaactggatcccttccttacaccttatacaaaaattaattcaaggtggattaaagacttacatgttagacctaaaaccataaaaaccctagaagaaaacctaggcatctttccttttttatttgtgtttcctgacaccatgcatttgagaaaactatgtcttatagtctttacaggctggcttcttacagacagagcgagaacttcaccaatcaatctgactgtctgtagtctgggggcctttcaagccctttctgtggatgcgtcttctctagatgtgtgtgtgtgtaaattctcaatgaaaggtcacaaagatcatacattgtatgatgctgtttgcatgaaatatccagaataggtaaatttatacttagagaaatcagactgatggttgccagaggctgagagggaaggaacggggagtgaatgcttaatggatacagaggtttctttggtgataaaaatgttttcatttttatctagaagctagatagagttgatgattgtacaacatagtgaatgtactaaatgccactgaattatacactttaaaatagctaatttttatgttacgcatatttccttattattaatttatttattttgagatggagtctcactctgtcgcccaggctggagtgcagtggtgcaatcttggctcactgcaacctccgcctcctgggttcaagcgattctcctgcctcagcctcccaagtagctgggattacaggcacccaccatcatgccaggctaatttttgtatttttgtagagaaggggtttcaccatgttggccaggctggtcttgaactcctgacctcaggtgatttgcctgccttggcctcccaaagtgctgggattacaggtgtgagccaccatgcccagcctgtgaatttcatctgaataaaataatgtgtgcgtttatacgtatataaagagataaaacaatgggcaaaagattaacaattgttggagggtatatgggtgttcattcaactcttcttttagtctaaaatattttaagtaaaagttagaaaaacggagagaatacttggtgtttaattttttagccatttccatcattttcagtttatctcttctgaaggcaaaaagtgatagcttataaattgtataatgtcagcataaaagatgaaattaagtcaattctaaaaaaaaaaacaactaaaagtgagtaattttaaaaatataggtatctttctggttaagtttttccagtagaatgccaaatctctcggtgttaatgcacaaagtttataaaatgtgtgtttctttgaatataatgttctctggcctatggttttatgggaaacgtttatatttacatctaaataaatacaagattgttttttgagagagagtctcactctgtcacctgggctggaggcagcaatcatagctcactgcaatcttaaactcctgggctcaagcaatctttgcctcccaataaatacaagattttacgtaaaatgacatgaagaaaaagtgtcccaagtgataacaaaagagagtgtgtgtctcagatattgctggtcctaagacatgttatcataatgtcacactcagtgtgaagcattctttttttttttgagttggagtctccctctgtcacccagcctggagcgcagtggcgtgatcttagctcactgcaacttttttgtcccaagttcaagcgattctcctgtctcagcctcccgagtagctgggattacaggtgcacaccaccacacccagctaatttttgtatttttagtagagacagggtttcaccatgttggccaggctggtctcgaacttttgacttcaaatgatccaccctgccttggcctcccaaagtgctgggattgcaggggtgagccaccactcctggcccagtgtgaagcattctatactgttgtgctcttgtcctgagtttatttccccaaggctttctatattttggcaaaagcaaaggttaatgttctgcaatgagtttcccaaaagctgagagagtgaaagaaaatcttggaaaaggaagccatgaagagaaatatgacctcatatcaaactaaccatttcatttttttggttaacaggaagcagtattttaaatatttcatatcctaacatgacagtttgttactgattactgatacacaagccttttactagtttcagctatattccaggaaattatttgagacttttgggttgaggtacaatacagccttttcacatttgaaataatggaatatagagtcccagtggacaattttgtgagcatctgcttttcagaaacgtataattgacattaagcaggagttacctctatcaagacaatgaatgtggatggcacacagcaatggcaaaaaatggagctggaattcagaggattaatattaatcctttattactaataataatttattaatatttgaggcacatgtcgagagtattaacatgttttctctgtcatgttttctcttcccttgttctttataatgacatggtgtagtcaaaaacaattttcatggtttgttctatatatttctataccctttcatccatcatcaattcatcctccacccctccatcccttcactcattcctctacctatccatccatccatccatcatccatccctctaaccatttatctatccatccatccatccatccatccatccatccatttatccatccatccatccatccatccatccatccatccatccatttatccatccatccatccatccatccatccatccatccatccatttatccatccatccatccatccatccatccatccatccatccatccattcatttatccatccatccatccatccatccatccatttatccatccatccatccatccatccatccatccatccatccatccatccattcatttatccatccatccatccatccatccatccatccatccatccatccatcattggtgccagtcaatttgtgctaggtgttgagcatccaaatcccactgctcatttctccatatcttgatttctttttctaaactcctgtctgtttcagcccttcctatttagtaaacattaatgtgtccatgtcccttggtcaccagttatacaaaaatgaataattgcaggctcttgccattgaggaactcatggtctatggcagtgccactcaaattgtggtccatgaactgttactgacccttgtgaagaaattaatcttggactaaagcaattctttaacctcagcctcccaagtatctgggaatatgggactacaggtgtgtgccaccatgcccagctaatctttaaaaaatgtttttgtagaggcagggtctctctatgatctatctgtctctggaccattgctttgcctgagtcttggaagcccctcaaggatggaactcagtggaagaaatgtcctgaccagggaatctgcctcttggctgtgccaccaccatcactgccccagtatttaatgcagaaaaaaatctcctggacatcagatttcctttggaacatgagggtccctttgtagtaatggattccctcatctcctttctcttcttagatccaagcaaaaggacttgggtatctgccatatccaattatctgcatcagtgttgcccattttccccatggttaattgagagatgagtaaatgtttttccacaatcctccagggacaatccaagtatcatgggctctaggctcccactgaaactatttttttttcctaacagaaagggagacccagaggggttctgatgcaaaagctgtccctggagcctcgatccccagacaaggatgtctatctttgcatagaccaaggtggcactgattaaacccaagatgctggagcctggggaggtttttttcaggagctgtcttgcaatgaagggagttgacatgctcatggggcattgagagggatccatcactctgtctgcacacagaccttggtgactgggggtgagagtttggaacccagccttgtggagatcttgggggtctgggcataatttagagactagtattagtggcaagatgggcccccagaactgctggtattgtgtttcacaagctcattgggttgagcttgtacaggtatttggatggaaagatgaatttttgtctacctcttggacatttgccaacctgcacgctggatgcatcttaccttgtctgttattgctgctgtgaatccaagcaggctggacctctagatagcagaaggtcacccatgttgacgttcattccaaaccttccataaaatgtgctggaagcagcaaggggtgggcacctcaccttggccatggggccgggactagaacaacccatctggcatgggctggaagcaccttcagctcactttctggagactgtgaccatcctacaacagtgatgctctggaggaattctcagctcagaattccagggaagatgagttgagtgttaagtccaagaaagagacagtgtccagaatagagacagctcaggatctgaaatcaaactgggttcaaatcccagtctaccctcttcttagctgtgtgactttaggtaagtcacttaccctctctgagtccatttgtctttaactttagttccaacaatcattatttcccttgcaggacgtattcatttaacaactatttactgagcaggctctgctgtggatccttgagatgtgagaatgtgagaaataaataaataatataagtgaattaaattattttattaagtaaattatattatatattaaattaaataatataagtgaatataatataagagaatgtgagaatttaataaataatataagtgacagtttgtcctgcaaactgtcatgtgatcatttggctactaaagtgaccaagagtccagatcatgcctggtcataacggactgatgtgagttttattggcaacaagaagataaataatgtagctcctttcttctggtcactcagtgtcagcaaagggaccactctagacccacattttggcatccctgaggaaaacgggaaagggacaggtaaaaccacaactttaaaacttttcaaagggactctcctcccacccaaagaaggactgatttaggaatcactgtgagatgttccagcccagattagagtaagtcatggctactttttccagctctgcctgtctgactgtggggcagcaggtgagagaggttggatgggtggaacatttttttctgaaagagatttcagtgggaaacagtgtgccaaaagctcaggacataatcccagcactttgtgaggccaagatggggaggtattatttaaaactgggattaagggaccagcctgggaaacatagcaagaccgcatctctacaaaaaaattaaaaaataaaaattagtcaggtgtggtggtgcacacctggagtcccagctactcgggaggctgaggcaagaagatggcttgagcccaggagttgaaggctgcagtgagctatgattgtgctactgtactccagcctgggtgacagagtgaggctctgttccctctaccaaaaaaagctcaggacacaaaggcattacaatggaattagaggaactgctagagatccccaaaaccaggggtttttatttttttcagatgcatcaaagacagtgggaccacctgggcaccctgaaaggaaaggtgagtttgggggcacacaggagtgttgcctgggtttctgcctgcaatcatgttttatgtcttactcttgggtggattctgttatccaccagtccatacagtccggatgctctattacttctgcctggaataaacttccctcctctagctctctggaaaccttccctcctctacctgaccttcaaaacttccatgcctccttctctgtgaagccttccctgatcccatcccaggcagagtttcatcccctgggtacccaaatcatcatgcatgtatttttattacattgctcatcagactatgctgaaatgagttgcacaatgttcatgttctctctcaaactctaaattctataactgcagggctaaattatctgactcccgtacatctttggttgactctggaaaatgccaccaatgaggcactccatttcatttttggttggattttacacatacagtgcgtgtgtgtgtgtgtgtgtcaccagataagggtctgtgaaaacagaagaagaattacagaaaccagtggtggggcgatgacactgttctagacccaaatgtcaacctgtgtggtttcttcccaagagtgctctgcagtttcaaggcaggtcctgcagagttgttggtgcagaagccttccccaccatcccaaagggccacaatgcctgaaaccaggggaaatgccagtcctagaacagttctagggtggaccattggccctgagggttggcaagtgtggcttctctaccagaccagggtgggacatgatcacccattagccagaaatcataacttagtggtgaaggggagtctgtttgtgtgtgtgtgtgtgtgtgtgtgtgtgtgtgtgtgtgtgtgtatgtgtgtgtgtgtgtgtgaagcaaatcttgaatatctattacagtgtttggagatgtgtgaaatgccgatgcaagaacaaggactttggaattaaatctcattttgttagaatcttgacttggttaccttcttgctggttcatcctggacaaggcactgcacttctcagatctctgtcttctcatccccaaaattcatagaggtattaatacctatggtcatttttttttaattgagagagggtctcactctgtgttctgttgcccaggctggagtgcagtggtgtgatcacagctcactgcagcttccacctcctgggctcaagtgagcctcccaccttagcctcccaagtagccgggactataagcatgtgccaccatgcctggctaatttttctatttcttgtagagtcgggatcttgccatgttgctcaggctagtcccaaactcctgggctggtcccagcctcccaaagtgctgagattacagatgtgaaacaccacacccagcctaatagtgtggttattgttattgtcattgtcatcaagggcttgctgaatatttctataacagcttccccagccacctccattcccaccatcctcacttctcttcccaaaaacttagatttgcatttcattctttcattttttccattttcggggctcaggggttgatgaaagacagatgctcgaccaccttcaattatccaccgacagacttctcttcattactgagaatggggtacaaaaagtgtgtccttgggtaggaggtgataggcttagaggagctgcccagctctcagaaagctctccttgcttccaaaacacagctggaggagtgggtgtgaaaactattgcctgggcttctgcctgcaagcctattttatgtcttactcctgggtgcattttcttaaccaccagtccatagagtccagatactgtattatttctgtctggaacaaccttccctcttctagctctctggaaaattcctacctgaccttcaaaactcagctccaatgcctccttctctgtgaaggcttcccagatcccatcccaggcagagtttcatctcctgggtaccaaaaatcatcatgcatgtatttttattaaattgctcatcagactatgctgaaatgagttcaacaatgctcatgttccctgtcaaactctaactctaaattctataactgcagggctaaattgtctaactcccatacatctttgtttttcttttaattttttttgtgttggagtctcgctctgttgtccaggccggaatacagtggaatgatctcggctcactgcaacctctgcctcctgggtttaagcaattctcctgcctcagccttctgagtagctgggattacaggtgcccgccaccacacctggctaatttttgtattttttgtagagacagggtttcaccttgttggctgggctggtcttgaactcccatcctcaaatgatctgcccgcctcagcctcccaaagcattgggattacaggcgtgagccactacgcccagccaaactcccatacatctttgattgactctggaaaaatgctaccaatgaggcactccattccatttttggttagatttcactgttagaaagttctttgctaggttgaaccacacagctgccctcattaacatccaccttccagtagtataaagcaggcaattctactcttcccctcatgaaggtcatcagatagcaaggtcagtgtattagtctattcttgcattgctttaaagaactatctgagatgattgggtaatttataaagaaaatatgtttcactggcgatggttctgtaggctgtacaggacgtataatgacttctgcttctggggaggtctcagggaacttacaatcatggtggaagatgagggagaagcagatgtcttacatggcaggagtagaggcagagggaggtgctacacacttttttttggtgggtggaggagacggagtctcactctgtgcccaggctggaatgcagtggcacggtctcggctcactgcagcctccgcctcctgggttcaagtgattctcctgcctcagcctcccgagtagctgggattacagtcacctgccaccacacctggctaattttttgtatttttagtagagacagggtttcaccgtgttgaccaggctggttgcaaactcctgacctcgtgatcggcccgccttggcctcccaaagtgctgggactacagttgtgagccatcatgcctggctggtgctacacacttttaatgaccagatctcgcaagaactcactcactatcatgaccaagggggatggtactaaaccattcatgagaagccacctccatgatccaatcacctcccagcaggccccacctccaacattaaggattacaattcaacatgagatgtgggtggggacacaggtccaaaccataccaggcagctctcacctgtctcaagaggcttccctgaccacgtcttgtagtgtccttagctattacctacagggcatcctgaccacttcacccctgcacttccccctatcacaaaggtcttgtgcatttatcttcttgttggtcattggtctcctgatggagatggtggagtccagagaaccggggatcttgcctggatgattcacctctgaatgttttatgcccattctagggcatgacacattttgttgaatgcatggatgaatggtagagaggagcttggatggaatgagaaaaatcaggatggcgtataactaaagacagccttgcaggccatcatctgagtgaggaataattccacaggcagcctcatgacaaagagctccagggaggccttcagtagaatctacttgctcttaaatgatcagtcttgctgcttttttctttttttttaaatttaaccccatgcactcttttatttatttatctttttcttaaaattccattttccttttgaaacagggtctcgctcagtctcccaggctgaagtacaatggggtgatcatgcagcctcagcctgctgggctcaagcaatcctcttgcctcagtctcccaagtacctgggatgacaggcttgtatcaccccgcccagctaacttttgtaatttttttgtagagatggaggcaccctatgttgcccaggctggtctcaaactcctgggtgcaagcgatcttcccactgcagcctcccaaagtgctgggattacagacgtgagtcagtgcagccggcctccattgcactcttagtaatgccatgaagcagccactttgggcagctttttgtgttgtctgagagacactcttcctcagcccctggtcacctctgttgaaaactcttcctggctgtctggcatgctgggaatcagctctatttgttttgccctgaagatgtgttttattcataactcactctgactccttagaaaacaattcaataaaaactcagacgagttaatgggtgcagcacaccaacatggcgcatgtatacatatgtaacaaacctgcacgttgtgcacatgtaccctaaaacttaaagtataataataataataaaaaaaaacaactcagttgaggacgggcacagtggctcacgcctgtaatcccagcactttgggaggccaaggcgagctgatcacttgaggtcaggagtttgagaccagcctggccaacatggtgaaaccctgtctctactaaaaatacaaaaattagctgattgtgatggcatgtgcctgtaatccaagctacttgggaggctgaggcaggagaattgcttgaaccggggaggcggaagttgcagtgagccaggatcacgccactgtactcccgcctgggtcacagagcaagactctgtctcaaccaaaacaaaaccaaaccaaacaaaaagaaaacacctcaattgggttgagcagggatgaggatgctatcttccactcaccttgagcaggaatgagaaatagaatcttattttataaaacatacgaataataaaacagccctggtcatatagcccaaagtggataaatactggcgtaaagcaaaagtgctagctcagaccatttctctgagagaaccactcctgtcctctttgctttttcttttcctttttagcatgcttcttaaccatccacagttgggaaagaacattcaccaggtcctgcattttccattgctggagttgtgggcactgcatggtctttcagaataatctggctttgtctgggagcttggaggttgccgaagagaggaagtattcctgatttaagtgtgcagctcttcctggttcttggccatccttcttgttcacctcattcactcaggcaatacttagggacataaaatcttctagagctagtgtctcatagtagtccttgaaattgagtcagactacccacaggccgctgctctcccatccaatgcagtgaagccaccagtaatagctgagctcagcagcaactgcccctccccaggccattcaaccccctcctgctgtcattgtgcctctatggtttcctttctttagatttataccctaaatgtttttcttctgttaaatacgtttgggggtacatatgcaaggtgtgttacatggatatattgcatgatgctgatttgggtttcaattgaaactgtcacccaaattgcgaacatagtacccaataggtagttttttttttatggtgaaaagatatacatatatttagaattagccagctggactcagtttagatgatcccaattttgttggcaacatccaaagcatcataatcaggagccagtcgaacatatgccttcttctcttcatcaggctgaatcagggtgttgaccttggccacatccatgtcatagagctacttcacatgctgtttgatctggtgcttgttggcttcaatgtccacaatgaacgaaagtgtgtcattgtcttctatcttcttgatggtggactcagtggtcagcggcaacgtgatgattgcagagtggccaagcttgtttctcctgggggtgctctttcgaggatatttgggctgcctccggagtcacagtgtcttgggctgctggaaggtgggtgacatgtgggatcttttttttagtggctgtggacacctttcaacactgccttcttggcctttaaagccttcactttggcttcggctttaggaggggcaggagcttccttatttgctttcggcgccatcttgtgaaaagggcccaataggtagttttttaacccttgcttccctctgaagtccccagtgtctgctgttcccctatttatattcctgcgtacccagtgattagcttccactgataagtgagaacatgtggtatttggttttgtttctgccttaattcacttaggataatgggctccagttgcgtccatgtcactgcaatgaacaggtttttttttttttttctaagacaaggtcttgctcggtggcccaggctggagtgcagtgatgtgatcatagctcactgcagcctcgacctcccaggctcaagtgatcctcctgccgtagcctccccagtagctgagactacaggcagtcaccaccaagtcgaactttaaattttttgtagagatggtttttttttttttgacggagttttgctcttgttgcccaggccagagtgcaatggtgcgatctcggctcactgcaacctccgcctcctgggttcaagcgattcttctgcctcagcctcccgaatagatgggattacaggcatatgccaccacgctcagctaattttgtatttttagtagagatggggtttctccatgttggtcaggctggtctcgaactcctgacctcaggtgatccacccgcctcggcctctcaaagtgctgggattatagccatgagccaccatccccgggctccaagatggggtcttgtcatgtcacccaggctggtcttgaactcctgggctgaagtgatcctcctgtcttggcttcttaaggtgctaggattacaggcatgagccactgtgcccagccaattgtattcttttttatggctgcatagcaatccatggtgtctatatactacatttaaaaaaatccagtccaccactgataggcaccccggttgattcaatttctttgttattgtgaatagtgctgtgataaacatgctcatttggtagaatgatttattttccttgggcattccctcaatttgattccagtgctggctcatcacagatttctctttgcttcagattctcatccacgcatttagacccaagcaagcccttctctctgttttcttacttagcttgttgcttcagtttcatcatcccgtttcacctcccagcccttttggtatctgacctcagctttggttaaggacccctgggatgaggggtattgaagcattccaccatctatgtggctgtctttaacttgaaccgcatttttttttttgagatggagtctcgctctgttgcccaggctggagtgcagtggcatgatctcggctcactgcaacctccaccacccgggttcaagcaattctcctgtgtcagcctcctaagtagctgggattacaggcgagtgccaccacacccagctgatttttgtacttttagtagagacgaggtttcaccatattggtcaggctggtctcgaactcctgacctcgtgatccacctgtctcggcctcccaaagtgctgggattacaggcgtgaggcaccacgtccagccgaacctcaaatttttcactatagggagcagtgggtagctcttcattggagtgtggccaagcgtctcattcagagatgccagctgcttctttcccatcccatgccttggatagacactaactgattaagttttctccctccagcctactgattctagctgcagcctcattactcttctcaagacaccatcccaggaagccactaccaatcaatgatgattggcatgtgagatgaaaattatttgccaccccatgcaggcttcttgccatagttcagctgttcttcctgcagctaaagtgcattgtgtaaaacatgggggatgtgaatcagtcggtggcctcagacttcattctggtgggcctcttcagtcactcaggatcacgccagctcctcttctccctggtggctgtcatgtttgtcataggccttctgggcaacaccgttcttctcttcttgatccgtgtggactcccggctccacacacccatgtacttcctgctcagccagctctccctgtttgacattggctgtcccatggtcaccatccccaagatggcatcagactttctgcggggagaaggtgccacctcctatggaggtggtgcagctcaaatattcttcctcacactgatgggtgtggctgagggcgtcctgttggtcctcatgtcttatgaccgttatgttgctgtgtgccagcccctgcagtatcctgtacttatgagacgccaggtatgtctgctgatgatgggctcctcctgggtggtaggtgtgctcaacgcctccatccagacctccatcaccctgcattttccctactgtgcctcccgtattgtggatcacttcttctgtgaggtgccagccctactgaagctctcctgtgcagatacctgtgcctacgagatggcgctgtccacctcaggggtgctgatcctaatgctccctctttccctcatcgccacctcctacggccacgtgttgcaggctgttctaagcatgcgctcagaggaggccagacacaaggctgtcaccacctgctcctcgcacatcacggtagtggggctcttttatggtgccgccgtgttcatgtacatggtgccttgcgcctaccacagtccacagcaggataacgtggtttccctcttctatagccttgtcacccctacactcaacccccttatctacagtctgaggaatccggaggtgtggatggctttggtcaaagtgcttagcagagctggactcaggcaaatgtgctgactacatagaaactgctggtgagattccagcggtcctcgatcccacccaccttcccaaagtatgcatttggcattcaattgccaatttgtgcaactggccaaatatccagccattgcccaaggtgcaactttttgagaaaatgtctgccttttaaattgaggtagaatacacgtaacataaaatgagccactttgaagtgtaaaattcagctgctaagtgcttatgtccaaggctaagtgtctgcccagttcctccctgctcacgccgagttcctccctgctgatgactagctgggttcatgttttccctcatggacttgtggaaagcaatggtaatcatcccaatcacattcagcatattttttttctctctcttttttttctttttgtaacggggtctcactctgtcgcccaggctggaatgctgtgacatggtcatagctcaccgcagactagaactcctaggctcaaggggtcctcctgcctcagcctcttgagtatctgggactacaggcatgtgccaccacgcccagctaattttgttcattttttgtagagatggggtctcatgatgttgcccaggctcgtattgaattcctggactcaagcaatcctcccatctcggcctcccaaagtgctgggattacagatgtgagccattgtgctcagacagtatattatttctgtaacaatgtacccccccccccattttttttgagatggagtctcattctgtcatctaggctggagtgcagtggtacagtctcggctcactgcaacttccacctcccgggttcaagcaatcttcccacctcaacctctcaagtagctgggattacaagcgtgcgccaccatgcctaactaatttttgtatttttagtatggatggggtttcaccatgttgaccaggctggcctcaaactcctgacttcaagtaatctgcccttcttggcctcccaaagtcctgggattacaggtgtgagccaccacatctggccagaaatatcaatatattataaagctaatatttaaacattataaagctaacaaaactctgaagaagtgtcagcaccaaagctggccctgagaagaaaacagaaaataaatcaggtgtaacttagatattttattaaaatatgtatatttacagtgtctactgggtgataagtaaaatatacaaattaattaaaaatatacaaggagctccagtaactcagtaggacaaaatcttttttttttttttttttttttttttttgagacagagtctcattctgttgcccaggctggagtgcagtggctcgatctcggctcacctccacctccacctcccaggttcaagcaattcttctacctcagcctcctgagtagctgggattacaggtgcctgccaccacccctggctaatttgtgtatttttagtagagacggagttacaccatgttggccaggatggtctcgaactcctgacctcatgtgatccgcccacctgggcctcccagagtgctgggattacaggtgtgagccaccacaaatcctcaccctgaagccccacaaattcactccatctcctcacctttcattcaaggtcacagacttgttatctacttcctgtgagacctgctcccaatctgtcctaactcccagctgttcttgttctcaccccgtctacctgtggtggtgtggtggctcatgactatagtcccagcactttgggaggccgagatgggcatatcacttgaggtcaagagttcgagaccagcctggccaacatggcgaaaccccatctctgctaaaaatacaaaagttagctgggtgtggtagcgggcacctgtaatcccagctactcaggaggctgaggcagaagaattgcttgagcccaggaggcggaggttgtagtgagccaagatggcaccactgcactccagcctgggcgacagagtgagaccctgtcttaaaataaaaaaagttataaacatggaatcaccacacaacccaaccattccgctccttggtgtatacccaaaagaagtgtgcttaaacaaattcttgctcatgcatgctcacagcggcctacctctacagccaaaggtggaaaaaacccaaacgtccactaatggaggaatgcataaacagaatcaatataatggaatgttacttggtcataaaaaggaatgaaagactggctgtggtagcttgcacctgtaatcccagcactttgggaggccaaagtaagaggattacttgaggccaggagcttgaaaccagcctgctcaacatagtgaaactccatctctacaaaaagtaaaaaaaaaaaaaaaaagtccaggctgtggtggcacgcacctgtagtcttagctgcttgggagactaaggcaggagaatcacttgagcctggaagcagaggttgcagtgagccaagatcacaccactgcattccagcctgggtgatagagtgagaccctgtcttgcaaaaaaaaaaaaaaaaaaaaaaaaaaaaaagaaaagaaaagcaaaaaagatatctgctaccatgtatataaaccttgaaaatattataataaatgaaagaagcctgacacagtagatagcatgtggtataaattcatttatataaagtatctagaatagttaaatcaatagaaagagaaagcagattgatgatggccggtcgtagtggctcatgcctgtaatcccagcactttgggaggctgaggtgggcggatcacctgaggtcaggggtttgagaccagcctggccaacatggtgaaaccttgtctctcctaaaaataaaaaaatacaaaaattagccgggcgtggtggtgcatgcctgtactcccagctactcaggaatctcaagagaatcaactgaaccgggaggtggaggttaaagtgagtcgagattgcgccattgcactccagcctgggtgacagagccagactctgtcttaaaaaaaaaaaaaagaaagaaagcagattgatggctacatgatcttagaggtgggtgcagaggggaattggggttgattacttaatgggtaagagtctgattttgggtggcaaaaatgacttggaactagagagaggggacagctggggcatcacttcatgaatgtaccagatgctgctgatttgttcactttaaaataattagtgttttattatgtcaattccacctcaataccaaaaattattctcaagtttgatattaggaaaagaaaacttagagcaaaagcaataacacaaagcagtaaatcgatggaggaacatttgtttttagaaccatttctgtcctgaaaacctagtgtgtgataaagatagaatttcaaaacatctcgacaatgatgatttaataagagtcctgtggacaatagattacacatgtgtaaaagaattttgctcgactaacttttgaatttaggaaaactcctcaatatgttagaaatattaatatatcatcaagctaatatttaaacattataaagctaacaaaactctgaggaagcaagaagaaaacaaactaaatcatgggcaacttagatatttgatcaaaatatgcacatttacagggtctatcaggtgataagtaaaatatagaaattaatttaaaatacagaaggagctcaaaaaactcaatagaacacaatctttttttttttttttttttcctgagacagagtctgttgcccagtctggagtgcagtggaacaatctcggctcaccccaacctccacctcccaggttcaagcaattctcctgcgtcagcctcccgagtagctggccctacaggcacctgctaccatgcccggctaatttgtgtatttttagtagagataggatttcaccatattggccaggctggtttcaaatgcctgacctcaggtaatcttcccacctcagcccctcaaagtgctggcattacaggtgtgagacaccgtccttggcccaataggacaaaaatctaataattaataatttgattttgaaaatgggcaaaagacatgaatagattttttttttcaagacagagtctcactctgtcacccagactggagtgcaatggcacgatctcagctcactgcaacctccgcctcccaggttcaagcgattctcctgcctcagcttcccaagtagctgggattacaggcaccagccaccacgcccagctaatttttgtacttttagtagacaaagggtttcatcatgttggccaggctggtctcaaacttctgatctcaggtgatccacccaccttggcctcccaaagtgctgggattacaggcatgagccaccgcgcccggcctctgaatagacgtttttcaaaagaagatatacaaatggcaaacaggcttatgagaaggtactcaacatcactgatcatcagagaaatgcaagtcaaaactgtgaggagatatcatcttaccccagttagcttacatccaaaagacagacaataatacatgctggtaaggatgtggagaaaaaggaacgcttgtacagtgttggttaattcaatcactatggagagcagcaagggccacacagtgagaccctctctcttaaaaaaaattacaaaaacaggcctggtatagtggctcacacctgtaattccagcactttgggaggcctaggcaggcagatcgcctgagctcaggagttcaaaatgagcctgggcaacttggcgaatccgattctctaataaaaatacaaaaattagctgggtgtggtggagcacgcctgtaatcccagttacttgggtggctgaggcacgagaatcgcttgaggctgggatgcagaggttgcagagagtcaagattttaccactgcactccagcctgtgcgccagagtgagactgtgtcaaaaaaaaatggtgaatagaagaataattgaataactgcctcagacatttatacagttctcatctcattctgggcacacggaagatcatgttggcctcatctccttgattttaaaaacagtattctaaaatcaaggagactagatgtatcacttctaggccaaatcatgaaggaaaatgtgtaagagtttcatgtgctcttcatctctgtgatcagaattgaagaaggcatgagtttgagatgctgcatcaccaagatcgtggtgattccattatcattacccttgtaacttgtgagcatccttactgccagcaatcattattagatatcaaatttgagataggagttcatatttactgtatgaatatcttggtctgggagtggtggctcatgcctgtaatcccagtgctttgggaggcagaggaaggaggctcacttgagcccaagagtttgagaccacccaggacaacacagggagaccccatctctacaaaaaatgtaaaaatcagccaagtgtggtggtaggtgcctgcagtcccagcaatttgggaggctgatgtgggaggatcccttgagcctgggatgtcaaggctgcagagagccgagatcatgccactgaacttcagcctgggcaacagagcaagactctctctcaaatacaaaacgctttttcctttaggcttaaattctaaccctcaaacctccaatgtgaaggtattaggaggtggggcccttgggagatgatgaggttgtgaaagtggaaccctcgtaaatgggattagtgcccttctgaaagtggcagaagagagctcgccaacaccttccatgtgaggagacagggaagatatgacagtctccaacctggaagagggtcctcaccagaccctgatcatgctggcaccctcatcttggaattccagcctccagaacagtgataaacaaatgtctgttcttaaaaaaaaaaaactgtggaaagcaatgttaatgttcccaatcacttttggtacattctttccttaactatgtcttaatgcatagttgtgttggatggcctactttgtaatgttagaatatgcatgttagtgaattaacaaatacagcagtaaagaatgctcttcgggttgggaatggtggctcacgcctgtaatcccagcacattggaaggccaaggtaggcagataacctgaagtcgagagttcgagatctgcctgatcaagagaaatccgactctactaaaaatacaaatcagcctgtcacagtgtcgcatgcctttaatcccagctactggggaggctgaggcaggagaatcacttgaacctaggaggcagaggttgtggtgagccaagatcacaccattgcactccagcctgggcaacaaaagccaaactctatctcaaaaaagaaaaaaaaaaaaaaaaagaaatgctgtttgttgaccatttgaatggctagtcttggtgcttcctggtgggtgaggagagccctgccccattcctacccattcaagtagacatggcataagagtgattctcactttctcctatagcctccttatccattggctgaaaagattgttttttaacgtgtcttataaatgcttccatagcaaaaaaaatgaattgacttttatagtgactctttcggggattgttacccataattccgtaatttgtttgaactcctaaaaaagggaagtatgccgagcacaatggagatttcgtctcaaaaataaataaataaataaataaataaataaataaataaataaatagaaaagaaagaaaaggaagtaaagggaaatatacaaatatacaaggtgttatgagagagttgctaattgtgattccctcttaattgtccaaagagaccacctctggggatctattcctaaaagactcgttagaagtgcagactcgctctctccctctccctctccctctcccgtctccccacagtctccctctccctctctttccatggtctccctctgatgccgagccgaagctggactgtactgctgccatctcggctcactgcaacctccctgcctgattctcctgcctcagcctgcggagtgcctgggactgcaggagcgcgctgccacgcctgactggttttcgtatttttttggtggaaatggggttttgctgtgttggccgggctggtctccagctcctaaccgcgagtgatccgccagcctcgcctcccgaggtgcccggattgcagacggagtcttgttcactcagtgctcaatggcgcccaggctggagtgcagtggtgtgatctcagcttgctacaacctccacctcccagctgccagccttggcctcccaaagtgccgagattgcagcctctgcctggccgccaccccgtctggaaagtgaggagcgtctctgcctggccgcccatcgtctgggatgtgaggagcccctctgcccggccgtccagtctggaaagtgaggagcgtctctgcccggccgccatcccatctaggaagtgaggagcgtctctgccaggccgcccatcgtctgagatgtggggagcgcctctgccccgccgccccgtctgggatgtgaggagcgcctctgcccggctgccctgtctgagaagtgaggagcccctctgcctggcagccgccccgtctgagaagggaggagcccctccacccggcagccaccccgtctgggaagtgaggagcatctccgcctggcagccgccccgtccgggagggaggtgggggcgtcagccccccgcccggccagccgccccatccgggagggaggtgggggggtcagccccccgcccggccagccgccccgtccgggaggtgaggggcgcctctgcccggccgcccctactgggaagtgaggagcccctctgcccggccagccgccccgtccaggagggaggtgggggggtcagccccacgcccggccagccgccccgtcagggagggaggtggggggtcagcccaccgcccggccagccgtcccgtccgggagggaggtgggggggtcagcccccgcccggccagccaccccatccgggaggtgaggggcgcctctacccggccagccgccccgtctgggaggtgtacccaacagctcattgagaacgggccatgatgacaatggcggttttgtggaatagaaaagggggaaaggtggggaaaagattgagaaaccggatggttgctgtgtctgtgtagaaagaagtagacttgggagacttttcattttgttctgtactaagaaaaattattctgccttgggatcctgttgatctatgaccttacccccaaccctgtgctctctgaaacatgtgctgtgtccactcagggttaaatggattaagggcggtgcaagatgtgctttgttaaacagatgcttgaaggcaacatgctccttaagagtcatcaccactccctaatctcaagtacccagggaaacaaacactgcggaaggctgcagggtcctctgcctaggaaaactagagacctttgttcacttgtgtatctgctgaccttacctccactattgtcctatgaccctgccaaatccccctctgcgagaaacacccaagaatgatcaataaaaataaaaataaaaaaataaaaaaaagaagggcagactcatgcatttaagaatcactcagggaaatctgaagatgacctgtggtgggggtataaatggattcttaaatgtgtcttgtgattatgtgagagtgtgactgtgtgactgtgtgtgtgtgtgtgtgtgctgtcatctgtggagtgggggatcctcttttgccttgagaaagctcatctctgtccacttactctgggctctaccatctgtgccttgtatccagtagaaataaaacagtttgcggcagaaatggagttttattttattttacttttttattaggattatttgtagaccgggtctcactctgtcgctcaggctggagtgcaatggcacgatctcagatcactgcaacctgtgcctcctgcactgaagccatcctcccacctcagcctctggagtggggagatcccacacctgtgtaatttttgcattttttctagagatggggtttcctcatgctgcccgggctggtttccaacgcctgggctcaagtgatccacccgcctcagcctcccaaagtgctgggattacaggtgggagctactgtgcccggccagagatggagatttttgttcttcttttgatgagacggaacctcgcaccgtggcccaggctggagtgcagtggagtgacctcggctcactgcaagctctgcctcctggggtcatgccattctcctgcctcagcctcccaaagagctgggactacaggcgcccgacaccacgcccagctaaggtttttgcatttattattttttttttttgtagggacgggctttcaccgtgttagccaggacggtctcgatctcctgccctcgtgatgcacccgcctgagcctcccgaagtgctcggattacaggcatgagccaccatgcacggcccagaaatggagatttttgagcaaacacattaaagaaaagaaacgcaaatagacgaaactcattttaacatttttatttaacccaaggaatacagatataatcaacaccaatacaattgatgtcacaatgatgactaagatacatgctacaatccttcattctcagatgcaaaatctagtatgtgttttacagcaaacgtcagttggaaactgaacgtcgatcacacatgcttgatgtgcatgtcaatttcatgagagttacaatctcaggagaagtctcacatagcgtaagagtccaaacataccttcaagtgttttgacaagttcttcactactcattcttagaactgaatttaccaacaacaatcccagcctattcattgctgaactgcatcccattgaaagaatgggtcacagttcctctctctagacactgtggaacgacattgaaggcccttccatcttttggcgattgtgaggacaggtgctagaagcctctgccctcagccttgtccacgtgagttctaattcctttagaacaactatctcagggtgggaaagatggttccaatgctaagtgcctattgcattgattatgaatcaatgaaactctttctccctgggggttgtcccagttggattccaagcagcactgtcagagtgttccagcttctccacatgctccgcagcccttgggatggtgagtgattgtcacggtggcttctgggagagcttcttggttgttgttgaaggtgtatttgacgtgcatttccccaggggagggacagtgaacgctttttgaagtggttctttacatcccctttgaggaaatgtctgctcaagtctctggctgggttttgaacagaatcatttgtttgtcccattggagttttgacaactctgtgtattctgagtatgagcagtccttgcacgtatatgagatttgcaaatattttgtgccccaatctcaaggttgctctttgatacaaatcaagagcatctgaggcagagcaaaggttcaggtgagaggacggagcatttctccacctctccagcatgcgcagcatctctctcctccgagatgccgagacatgtgtgcagggagacaccatgaaaaagcaggtgtgcttcattctgaatagagcgtctctgattcccgtctggtgcctgagggtgcatggcccatgagccttagaagagacgtcttcgggccttgcacgttggcctccatagaaacttgtggcaaattctgggctccggactgggtgatggaggtagaggtctgagggcagaggtgggcaggggctccaggccatggagatccaagtggaattcttcaggcagagcctgtctccagggactaggcttgggcatttgggatgagccctgggggacggccgctctgtagtcaggtttgaggtagaggacacgccaggaagaagggctgactccatgcacaaggtttgctgggggtcccatcaggggcaggaagccttggggagcctcaccctcttctactgaaggcgccacacacacattctctgctctctgggctctcacagatccattttcaatgtcaatctcccagacagtctctgtactagtgagcaggagccagcgggcatgggcagggtacaagagatccttcagggacatcaagagttgctcagggaccaccaggagctgcacattgaggaggctgagtcgcagggctccctgtgggtccagccccaggaactcctgccccaggcgcaggtgcaggaccattcctggttccaagaccgcgatgatcatcttcctctggggaagctgtgggccctgggggagaaaagccgtgggtcagtcattgtcctctgagggtggctcaaacagggagagagcaaggcggggagctgccagtaacttccccaggcataaatgaaaccccgcagggacacccagaattggcacctgtattgacgccccttgggacggtgatttcctgcaagtcccctagggcctggagctcaggcagacctgtctcacccacgcccacctaggtggtgtgaccttacctggggcagctccaggggcagctgtgcagggtggtggggagctggctgtaccggagctggttctgcacctgtggagagagcagagtgtgcaggtgaaagcccttgtcatgcaggatgcccttgagggttcaaggtgcctccgtgagaaagaccaaatacagaagaagccaggtacaggacacccagccacggagctgcaggaggaagctcccgacactctggacagcacagctgctcgcctcatgacgtgacgggacactggcttggtagcaggggactcaggatgaaaaagagaagatgcctcacctggatgaggacccagctcctccactttctggcgttttggggcatttgatggcgtgccgctggagctgtaggacagagagacacagtcagatttcgggcagttccctaacgtccaattccctgaatccccacaaattcactccacttccctgcctttcattcaaggccacagactcgtcatccacttcctgtgagacctgctcccaatctgtcctaactcccagctgttcttgttctcaccccatctacctgagcttccctgggtgaagaaaaggcagggaaggagggtcggtgcccacagggagcagtttaccctttcaggagctcatgcagatgagagttggaaaactctccttgggtgtgaggagctggagaaagatgttgagatcccggagaggtggcacctctgtctacacaggtaacaaaggaatggggtcttaggattcgaatcacagcaggagaagaggaaggaatttgtcgggcatgacggcatgcgcctgtaatcccagcactttgggaggccaaggtcggaggattgcttgagtccaggagtttgagagcagcctgggcaacatggtgaaagctagtctccactaaaaatactaaacattagtgggtcatggtggtgcatgcctgtggtctcacctactcaggaggctcaggtgggaggatcacctgcgactcagaggtggagcccgcagtcagctaaaatcacgccactgcactccagtgtggaccatcggagtgagacgctgtctcaataaaataaatcagtaaataagacaaatagaaaaattaaaaatgaaaaaaggaggaaactgttttatttttcctagtagatcttgaaactctcacatcatgtcctacaatctcccttcttgcagaacacagaacccattccctgtggagctggttgggtggattgaaagtggggctgccctgagatatgtgtgtggttgcgatgtagaagccttcccagcaccctgtgatgacttacgggcacctcacttccctctggccccaaattcaaaacatccaatctcatggcaggttcatgcacccttttcccttcccctctctccaacacacacccacacatcccacaggcaggtcaccccgcaggcgtccccagcacatagcaaagctcacccgctctctcctgcgtggtcgctcttggattcggtgcaggaatcactggggcttcttgggcgccgggaacctttcatggtgaaaatttccagggttctccaagtcagccactgccagtgtttgtctgtctcctgcaaagatttcttcttggctcccgaatcctttagttcctttgagagagtggtgtcagccccaaagctgctcccgaaggcttgggttgtgtagcgacggggctgtggccagcggcaggtggatgaggctctgacaactgagctcttgggggaatcttgtacactgtcagcagggggtggagccaggggatttgtcagcaggaactgatgtgattggctgttcctggtatgacaacgggaggggccctcatggaggattggggcgtaactcaatcgatagatgaccgatcaacagaacctgcctaaccccatcaagagccaacctgtttcctgtcccctcccatcctctaggtcttgcctaataatgatagacactttctgtcatacccaattcatccatcgctgaaatagtttttcatgtgtgccttttatattttcatgcaaaaaaaatatgttaattttcacgggggctatcctggggaatgctatgtacatgaaatgaagtgtcaaaggagcagaagcagaaggaaattcacaagcttctctgagcgtctctgcttgaattcctgccatgtttcctaaacatgttggcttctttcttcctacccaagtaagaaggtgcttcagaagatcaatcttagggcatttgacaaacgctgctgagaatttcaggatgacacgaaggaacctttgattggatttgtggatgtgcctgtgaaagcgtgtgtgtgtgtgtgtgtgtgtgtgtgtgtgtgtgtgtgtgaagccaggatgaagtggctgttcctggggtggagacccttctttctcttgagaatgttcattgctgttgactcattgtgggttttggagatattttctctctttctttcgttctttcagacattttttgctttctccctccctcgatcctaaccaccctccatcccccccctcactccctccctcccgctttccatccttcctccctcccttccctctttccttccttcctgccttcttccattccccttcccctcttccttctgtccttccttcctgtgtgtaaaagaaaaattggtgaatagaagaataattgaataactgcctgagtcacttatacatttctcatctcactctggggacacagaagaccgtgttgtactcatctcctcgattttaaaaacagtcattctaaaatcaaggattctagatgtatcacttctaggcgaaatcttgaaagaaaatgtgtaagagtttcatgtgctcttcatctctatgatcacaattgaagaaggcaggaggttgagatgctgcatcgccaagatcgtggtgattccattatcattacccttgtaacttgtgagcatccttactgccagcaatcattattagatatggaatctgatataggagttcatatttactgtatgaatatcttggtgtgggagtgttggctcatgcctgtaatcccagtgctttgggaggcagaggcgggaggccgaggcaggaggctcgcttgaacccaggagttcgagacaagccggaagagcatggcgagaccctcgtctctacaaaaatgtaaaaatcagccaagtgtgctggtaggtgcctgtagtctcagctccttaggaggctgaagtgttaggatcgctttcgcccgggatgtaatggctacagggagtcgagatcttgccactgaacttcagcctgggcaacagagcaagactctctctcaaaaataaaatgctttttcctttaggcttaaattctaacactcaaacctccaaagcggaggtattaggaggtggggcccttgggagatgatgagattatgaaagtggaaccctcgtaaatgggattagtgcccttctgaaagtgacggaagagagctcgccagcaccttccatgtggggagacagggaggatatgacagtctccaacctggaagagggtcctcaccagaccccgatcatgctggcactctcatcgtggacttccggcctccagaactctgatcaacaaatgtgtgttcttaaagaaaagaaaagtgtggaaagcaatgttaatgttcccaatcactttgagtacattctttccttaactatgtcttaatgcatagttgtgttggatggcctagtttgtaatgttagaatatgcatgttagtgaattaataaatacagcagtaaagaatagagttgtggttgggaatggtgtctcacgcctgtaatcccagcacaatggcatgccgaggcgggtcaatcacctgtagtcgggaggtggagatcaccctgaccaacatggagaattcccgactctactaaaaatacaaatcagcctgtcatagaggcacatgcctttaatcccagctactcgggaggctgaggcaggagaatcacttgaacctaggaggcagaggttgcggtgagccgagatcgcgccattgcactccagcctgggcaacaaaagctaaattctatatcaaaaaattaaaaaaaaaaaaagaaggctgtttgttgaccatttgagtggccagtcctggtgcttcctggtgggcgaggagagccctaccccattcctacccattccagtagtcatggcataagagtgattctcgctttctgctatagcctccttatccattggctgaaatgattgttttttaatgtgtcttataaatgcttccatagcaaaaaaatttgaattgacttttatagggactctttcggggattgttacccatcattccataatttgtttgtactcctagaaaagggaagtatgccgagcacagtggatatttcgtctcaaataataaataaataaccaaatagaaaagaaagaaaaggaagtaaagggaaatatacaaatatacaaggtgttaggagagagttgctaatcgtgattcccccttaattgtccaaacagaccacctctggggatctattcgtaaaagactcgttagaagtgcagactcatgcatttgagaatcactcagggaaatctgaagatgacctgtggtgggggtgtaaatggatacttaaatgtgtcttgtgattgtgtgagagtgtgactgtgtgtttgtgtgtgtgctgtcatctgtggagtgggggatcctcttttgccttgagaaagctcatctctgtccacttactctgggctctaccatctgtgccttgtatccagtagaaataaaacagtttgcggcagaaatggagttttattttattttactttactttttattaggattatttgtagaccgggtctcactctgtcactcaggcgggagtgcaacggcacgatctcagatcactgcaacctgtgcctcctgcactgaagccatcctcccacctcagcctctggagtggggagatcccacacctgtgtaatttttgcattttttctagagatggggtttcctcatgctgcccgggctggtttccaacgcccgggctcaagtgatccacccgcctcagcctcccaaagtgctgggattacaggtgggagctactgtgcccggccagaaatggagatttttgttcttcttttgatgagacggaacctcgcaccgtggcccaggctggagtgcagtggagtgacctcggctcactgcaagctctgcctcctggggtcatgccattctcctgcctcagcctcccaaagagctgggactacaggcgcccgacaccacgcccagctaaggtttttgcattttttttttttttttttgtagggacgggctttcaccgtgttagccaggacggtctcgatctcctgccctcgtgatgcacccgcctgagcctcccgaagtgctcggattacaggcatgagccaccatgcacggcccagaaatggagatttttgagcaaacacattaaagaaaagaaacgcaaatagacgaaactcattttaacatttttatttaacccaaggaatacagatataatcaacaccaatacaattgatgtcacagtgatgactaagatacatgctacaatccttcattctcagatgcaaaatctagtatgtgttttacagcaaacgtcagttggaaactgaacgtcgatcacacatgcttgatgtgcatgtcaatttcatgagagttacaatctcaggagaagtctcacatagcgtaagagtccaaacataccttcaagtgtttcgacaagttcttcactactcattcttagaactgaatttaccaacaacaatcccagcctattcattgctgaactgcatcccattgaaagaatgggtcacagttcctctctctagacactgtggaacgacattgaaggcccctccatcttttggcgattgtgaggacaggtgctagaagcctctgccctcagccttgtccacgtgagttctaattcctttagaacaactatctcagggtgggaaagatggttccaatgctaagtgcctattgcattgattatgaatcaatgaaactctttctccctgggggttgtcccagttggattccaagcagcactgtcagagtgttccagcttctccacatgctccgcagcccttgggatggtgagtgattgtcacggtggcttctgggagagcttcttggttgttgttgaaggtgtatttgacgtgcatttccccaggggagggacagtgaacgctttttgaagtggttctttacatcccctttgaggaaatgtctgctcaagtctctggctgggttttgaacagaatcatttgtttgttccattggagttttgacaactctgtgtattctgagcatgagcagtccttgcacgtatatgagatttgcaaatattttgtgccccaatctcaaggttgctctttgatacaaatcaagagcatctgaggcagagcaaaggttcaggtgagaggacggagcatttctccacctctccagcatgcgcagcatctctctcctccgagatgccgagacatgtgtgcagggagacaccatgaaaaagcaggtgtgcttcattctgaatagagcgtctctgattcccgtctggtgcctgagggtgcatggcccatgagccttagaagagacgtcttcgggccttgcacgttggcctccatagaaacttgtggcaaattctgggctccggactgggtgatggaggtagaggtctgagggcagaggtgggcaggggctccaggccatggagatccaagtggaattcttcaggcagagcctgtctccagggactaggcttgggcatttgggatgagccctgggggacggccgctctgtagtcaggtttgaggtagaggacacgccaggaagaagggctgactccatgcacaaggtttgctgggggtcccatcaggggcaggaagccttggggagcctcaccctcttctactgaaggcgccacacacacattctctgctctctgggctctcacagatccattttcaatgtcaatctcccagacagtctctgtactagtgagcaggagccagcgggcatgggcagggtacaagagatccttcagggacatcaagagttgctcagggaccaccaggagctgcacattgaggaggctgagtcgcagggctccctgtgggtccagccccaggaactcctgccccaggcgcaggtgcaggaccattcctggttccaagaccgcgatgatcatcttcctctggggaagctgtgggccctgggggagaaaagccgtgggtcagtcattgtcctctgagggtggctcaaacagggagagagcaaggcggggagctgccagtaacttccccaggcataaatgaaaccccgcagggacacccagaattggcacctgtattgacgccccttgggacggtgatttcctgcaagtcccctagggcctggagctcaggcagacctgtctcacccacgcccacctaggtggtgtgaccttacctggggcagctccaggggcagctgtgcagggtggtggggagctggctgtaccggagctggttctgcacctgtggagagagcagagtgtgcaggtgaaagcccttgtcatgcaggatgcccttgagggttcaaggtgccaccgtgagaaagaccaaatacagaagaagccaggtacaggacacccagccacggagctgcaggaggaagctcccgacactctggacagcacagctgctcgcctcatgacgtgacgggacactggcttggtagcaggggactcaggatgaaaaagagaagatgcctcacctggatgaggacccagctcctccactttctggcgttttggggcatttgatggcgtgccgctggagctgtaggacagagagacacagtcagatttcgggcagttccctaacgtccaattccctgaatccccacaaattcactccacttccctgcctttcattcaaggccacagactcgtcatccacttcctgtgagacctgctcccaatctgtcctaactcccagctgttcttgttctcaccccatctacctgagcttccctgggtgaagaaaaggcagggaaggagggtcggtgcccacagggagcagtttaccctttcaggagctcacgcagatgagagttggaaaactctccttgggtgtgaggagctggagaaagatgttgagatcccggagaggtggcacctctgtctacacaggtaacaaaggaatggggtcttaggattcgaatcacagcaggagaagaggaaggaatttgtcgggcatgacggcatgcgcctgtaatcccagcactttgggaggccaaggtcagaggattgcttgagtccaggagtttgagagcagcctgggcaacatggtgaaagctagtctccactaaaaatactaaacattagtgggtcatggtggtgcatgcctgtggtctcacctactcaggaggctcaggtgggaggatcacctgcgactcagaggtggagcccgcagtcagctaaaatcacgccactgcactccagtgtggaccatcggagtgagacgctgtctcaataaaataaatcagtaaataagacaaatagaaaaattaaaaatgaaaaaaggaggaaactgttttatttttcctagtagatcttgaaactctcacatcatgtcctacaatctcccttcttgcagaacacagaacccattccctgtggagctggttgggtggattgaaagtggggctgccctgagatatgtgtgtggttgcgatgtagaagccttcccagcaccctgtgatgacttacgggcacctcacttccctctggccccaaattcaaaacatccaatctcatggcaggttcatgcacccttttcccttcccctctctccaacacacacccacacatcccacaggcaggtcaccccgcaggcgtccccagcacatagcaaagctcacccgctctctcctgcgtggtcgctcttggattcggtgcaggaatcactggggcttcttgggcgccgggaacctttcatggtgaaaatttccagggttctccaagtcagccactgccagtgtttgtctgtctcctgcaaagatttcttcttggctcccgaatcctttagttcctttgagagagtggtgtcagccccaaagctgctcccgaaggcttgggttgtgtagcgacggggctgtggccagcggcaggtggatgaggctctgacaactgagctcttgggggaatcttgtacactgtcagcagggggtggagccaggggatttgtcagcaggaactgatgtgattggctgttcctggtatgacaacgggaggggccctcatggaggattggggcgtaactcaatcgatagatgaccgatcaacagaacctgcctaaccccatcaagagccaacctgtttcctgtcccctcccatcctctaggtcttgcctaataatgatagacactttctgtcatacccaattcatccatcgctgaaatagtttttcatgtgtgccttttatattttcatgcaaaaaaaatatgttaattttcacgggggctatcctggggaatgctatgtacatgaaatgaagtgtcaaaggagcagaagcagaaggaaattcacaagcttctctgagcgtctctgcttgaattcctgccatgtttcctaaacatgttggcttctttcttcctacccaagtaagaaggtgcttcagaagatcaatcttagggcatttgacaaacgctgctgagaatttcaggatgacacgaaggaacctttgattggatttgtggatgtgcctgtgaaagcgtgtgtgtgtgtgtgtgtgtgtgtgtgtgtgtgtgtgaagccaggatgaagtggctgttcctggggtggagacccttctttctcttgagaatgttcattgctgttgactcattgtgggttttggagatattttctctctttctttcgttctttcagacattttttgctttctccctccctcgatcctaaccaccctccatcccccccctcactccctccctcccgctttccatccttcctccctcccttccctctttccttccttcctgccttcttccattccccttcccctcttccttctgtccttccttcctgtgtgtaaaagaaaaattggtgaatagaagaataattgaataactgcctgagtcacttatacatttctcatctcactctggggacacagaagaccgtgttgtactcatctcctcgattttaaaaacagtcattctaaaatcaaggattctagatgtatcacttctaggcgaaatcttgaaagaaaatgtgtaagagtttcatgtgctcttcatctctatgatcacaattgaagaaggcaggaggttgagatgctgcatcgccaagatcgtggtgattccattatcattacccttgtaacttgtgagcatccttactgccagcaatcattattagatatggaatctgatataggagttcatatttactgtatgaatatcttggtgtgggagtgttggctcatgcctgtaatcccagtgctttgggaggcagaggcaggaggctcgcttgaacccaggagttcgagacaagccggaagagcatggcgagaccctcgtctctacaaaaatgtaaaaatcagccaagtgtgctggtaggtgcctgtagtctcagctccttaggaggctgaagtgttaggatcgctttcgcccgggatgtaatggctacagggagtcgagatcttgccactgaacttcagcctgggcaacagagcaagactctctctcaaaaataaaatgctttttcctttaggcttaaattctaacactcaaacctccaaagcggaggtattaggaggtggggcccttgggagatgatgagattatgaaagtggaaccctcgtaaatgggattagtgcccttctgaaagtgacggaagagagctcgccagcaccttccatgtggggagacagggaggatatgacagtctccaacctggaagagggtcctcaccagaccccgatcatgctggcactctcatcgtggacttccggcctccagaactctgatcaacaaatgtgtgttcttaaagaaaaaaaaagtgtggaaagcaatgttaatgttcccaatcactttgagtacattctttccttaactatgtcttaatgcatagttgtgttggatggcctagtttgtaatgttagaatatgcatgttagtgaattaataaatacagcagtaaagaatagagttgtggttgggaatggtgtctcacgcctgtaatcccagcacaatggcatgccgaggcgggtcaatcacctgtagtcgggaggtggagatcaccctgaccaacatggagaaatcccgactctactaaaaatacaaatcagcctgtcatagaggcacatgcctttaatcccagctactcgggaggctgaggcaggagaatcacttgaacctaggaggcagaggttgcggtgagccgagatcgcgccattgcactccagcctgggcaacaaaagctaaattctatatcaaaaaattaaaaaaaaaaaaaaaagaaggctgtttgttgaccatttgagtggccagtcttggtgcttcctggtgggcgaggagagccctaccccattcctacccattccagtagtcatggcataagagtgattctcgctttctgctatagcctccttatccattggctgaaatgattcttttttaatgtgtcttataaatgcttccatagcaaaaaaaattgaattgacttttatagggactctttcggggattgttacccatcattccataatttgtttgtactcctagaaaagggaagtatgccgagcacagtggatatttcgtctcaaataataaataaataaccaaatagaaaagaaagaaaaggaagtaaagggaaatatacaaatatacaaggtgttaggagagagttgctaatcgtgattcccccttaattgtccaaacagaccacctctggggatctattcgtaaaagactcgttagaagtgcagactcatgcatttgagaatcactcagggaaatctgaagatgacctgtggtgggggtgtaaatggatacttaaatgtgtcttgtgattgtgtgagagtgtgactgtgtgtttgtgtgtgtgctgtcatctgtggagtgggggatcctcttttgccttgagaaagctcatctctgtccacttactctgggctctaccatctgtgccttgtatccagtagaaataaaacagtttgcggcagaaatggagttttattttattttactttactttttattaggattatttgtagaccgggtctcactctgtcactcaggcgggagtgcaacggcacgatctcagatcactgcaacctgtgcctcctgcactgaagccatcctcccacctcagcctctggagtggggagatcccacacctgtgtaatttttgcattttttctagagatggggtttcctcatgctgcccgggctggtttccaacgcccgggctcaagtgatccacccgcctcagcctcccaaagtgctgggattacaggtgggagctactgtgcccggccagaaatggagatttttgttcttcttttgatgagacggaacctcgcaccgtggcccaggctggagtgcagtggagtgacctcggctcactgcaagctctgcctcctggggtcatgccattctcctgcctcagcctcccaaagagctgggactacaggcgcccgacaccacgcccagctaaggtttttgcatttatttttttattttttttgtagggacgggctttcaccgtgttagccaggacggtctcgatctcctgccctcgtgatgcacccgcctgagcctcccgaagtgctcggattacaggcatgagccaccatgcacggcccagaaatggagatttttgagcaaacacattaaagaaaagaaacgcaaatagacgaaactcattttaacatttttatttaacccaaggaatacagatataatcaacaccaatacaattgatgtcacagtgatgactaagatacatgctacaatccttcattctcagatgcaaaatctagtatgtgttttacagcaaacgtcagttggaaactgaacgtcgatcacacatgcttgatgtgcatgtcaatttcatgagagttacaatctcaggagaagtctcacatagcgtaagagtccaaacataccttcaagtgtttcgacaagttcttcactactcattcttagaactgaatttaccaacaacaatcccagcctattcattgctgaactgcatcccattgaaagaatgggtcacagttcctctctctagacactgtggaacgacattgaaggcccctccatcttttggcgattgtgaggacaggtgctagaagcctctgccctcagccttgtccacgtgaattctaattcctttagaacaactatctcagggtgggaaagatggttccaatgctaagtgcctattgcattgattatgaatcaatgaaactctttctccctgggggttgtcccagttggattccaagcagcactgtcagagtgttccagcttctccacatgctccgcagcccttgggatggtgagtgattgtctcggtggcttctgggagagcttcttggttgttgttgaaggtgtatttgacgtgcatttccccaggggagggacagtgaacgctttttgaagtggttctttacatcccctttgaggaaatgtctgctcaagtctctggctgggttttgaacagaatcatttgtttgttccattggagttttgacaactctgtgtattctgagcatgagcagtccttgcacgtatatgagatttgcaaatattttgtgccccaatctcaaggttgctctttgatacaaatcaagagcatctgaggcagagcaaaggttcaggtgagaggacggagcatttctccacctctccagcatgcgcagcatctctctcctccgagatgccgagacatgtgtgcagggagacaccatgaaaaagcaggtgtgcttcattctgaatagagcgtctctgattcccgtctggtgcctgagggtgcatggcccatgagccttagaagagacgtcttcgggccttgcacgttggcctccatagaaacttgtggcaaattctgggctccggactgggtgatggaggtagaggtctgagggcagaggtgggcaggggctccaggccatggagatccaagtggaattcttcaggcagagcctgtctccagggactaggcttgggcatttgggatgagccctgggggacggccgctctgtagtcaggtttgaggtagaggacacgccaggaagaagggctgactccatgcacaaggtttgctgggggtcccatcaggggcaggaagccttggggagcctcaccctcttctactgaaggcgccacacacacattctctgctctctgggctctcacagatccattttcaatgtcaatctcccagacagtctctgtactagtgagcaggagccagcgggcatgggcagggtacaagagatccttcagggacatcaagagttgctcagggaccaccaggagctgcacattgaggaggctgagtcgcagggctccctgtgggtccagccccaggaactcctgccccaggcgcaggtgcaggaccattcctggttccaagaccgcgatgatcatcttcctctggggaagctgtgggccctgggggagaaaagccgtgggtcagtcattgtcctctgagggtggctcaaacagggagagagcaaggcggggagctgccagtaacttccccaggcataaatgaaaccccgcagggacacccagaattggcacctgtattgacgccccttgggacggtgatttcctgcaagtcccctagggcctggagctcaggcagacctgtctcacccacgcccacctaggtggtgtgaccttacctggggcagctccaggggcagctgtgcagggtggtggggagctggctgtaccggagctggttctgcacctgtggagagagcagagtgtgcaggtgaaagcccttgtcatgcaggatgcccttgagggttcaaggtgccaccgtgagaaagaccaaatacagaagaagccaggtacaggacacccagccacggagctgcaggaggaagctcccgacactctggacagcacagctgctcgcctcatgacgtgacgggacactggcttggtagcaggggactcaggatgaaaaagagaagatgcctcacctggatgaggacccagctcctccactttctggcgttttggggcatttgatggcgtgccgctggagctgtaggacagagagacacagtcagatttcgggcagttccctaacgtccaattccctgaatccccacaaattcactccacttccctgcctttcattcaaggccacagactcgtcatccacttcctgtgagacctgctcccaatctgtcctaactcccagctgttcttgttctcaccccatctacctgagcttccctgggtgaagaaaaggcagggaaggagggtcggtgcccacagggagcagtttaccctttcaggagctcatgcagatgagagttggaaaactctccttgggtgtgaggagctggagaaagatgttgagatcccggagaggtggcacctctgtctacacaggtaacaaaggaatggggtcttaggattcgaatcacagcaggagaagaggaaggaatttgtcgggcatgacggcatgcgcctgtaatcccagcactttgggaggccaaggtcggaggattgcttgagtccaggagtttgagagcagcctgggcaacatggtgaaagctagtctccactaaaaatactaaacattagtgggtcatggtggtgcatgcctgtggtctcacctactcaggaggctcaggtgggaggatcacctgcgactcagaggtggagcccgcagtcagctaaaatcacgccactgcactccagtgtggaccatcggagtgagacgctgtctcaataaaataaatcagtaaataagacaaatagaaaaattaaaaatgaaaaaaggaggaaactgttttatttttcctagtagatcttgaaactctcacatcatgtcctacaatctcccttcttgcagaacacagaacccattccctgtggagctggttgggtggattgaaagtggggctgccctgagatatgtgtgtggttgcgatgtagaagccttcccagcaccctgtgatgacttacgggcacctcacttccctctggccccaaattcaaaacatccaatctcatggcaggttcatgcacccttttcccttcccctctctccaacacacacccacacatcccacaggcaggtcaccccgcaggcgtccccagcacatagcaaagctcacccgctctctcctgcgtggtcgctcttggattcggtgcaggaatcactggggcttcttgggcgccgggaacctttcatggtgaaaatttccagggttctccaagtcagccactgccagtgtttgtctgtctcctgcaaagatttcttcttggctcccgaatcctttagttcctttgagagagtggtgtcagccccaaagctgctcccgaaggcttgggttgtgtagcgacggggctgtggccagcggcaggtggatgaggctctgacaactgagctcttgggggaatcttgtacactgtcagcagggggtggagccaggggatttgtcagcaggaactgatgtgattggctgttcctggtatgacaacgggaggggccctcatggaggattggggcgtaactcaatcgatagatgaccgatcaacagaacctgcctaaccccatcaagagccaacctgtttcctgtcccctcccatcctctaggtcttgcctaataatgatagacactttctgtcatacccaattcatccatcgctgaaatagtttttcatgtgtgccttttatattttcatgcaaaaaaaatatgttaattttcacgggggctatcctggggaatgctatgtacatgaaatgaagtgtcaaaggagcagaagcagaaggaaattcacaagcttctctgagcgtctctgcttgaattcctgccatgtttcctaaacatgttggcttctttcttcctacccaagtaagaaggtgcttcagaagatcaatcttagggcatttgacaaacgctgctgagaatttcaggatgacacgaaggaacctttgattggatttgtggatgtgcctgtgaaagcgtgtgtgtgtgtgtgtgtgtgtgtgtgtgtgtgtgtgaagccaggatgaagtggctgttcctggggtggagacccttctttctcttgagaatgttcattgctgttgactcattgtgggttttggagatattttctctctttctttcgttctttcagacattttttgctttctccctccctcgatcctaaccaccctccatcccccccctcactccctccctcccgctttccatccttcctccctcccttccctctttccttccttcctgccttcttccattccccttcccctcttccttctgtccttccttcctgtgtgtaaaagaaaaattggtgaatagaagaataattgaataactgcctgagtcacttatacatttctcatctcactctggggacacagaagaccgtgttgtactcatctcctcgattttaaaaacagtcattctaaaatcaaggattctagatgtatcacttctaggcgaaatcttgaaagaaaatgtgtaagagtttcatgtgctcttcatctctatgatcacaattgaagaaggcaggaggttgagatgctgcatcgccaagatcgtggtgattccattatcattacccttgtaacttgtgagcatccttactgccagcaatcattattagatatggaatctgatataggagttcatatttactgtatgaatatcttggtgtgggagtgttggctcatgcctgtaatcccagtgctttgggaggcagaggcaggaggctcgcttgaacccaggagttcgagacaagccggaagagcatggcgagaccctcgtctctacaaaaatgtaaaaatcagccaagtgtgctggtaggtgcctgtagtctcagctccttaggaggctgaagtgttaggatcgctttcgcccgggatgtaatggctacagggagtcgagatcttgccactgaacttcagcctgggcaacagagcaagactctctctcaaaaataaaatgctttttcctttaggcttaaattctaacactcaaacctccaaagcggaggtattaggaggtggggcccttgggagatgatgagattatgaaagtggaaccctcgtaaatgggattagtgcccttctgaaagtgacggaagagagctcgccagcaccttccatgtggggagacagggaggatatgacagtctccaacctggaagagggtcctcaccagaccccgatcatgctggcactctcatcgtggacttccggcctccagaactctgatcaacaaatgtgtgttcttaaagaaaaaaaaagtgtggaaagcaatgttaatgttcccaatcactttgagtacattctttccttaactatgtcttaatgcatagttgtgttggatggcctagtttgtaatgttagaatatgcatgttagtgaattaataaatacagcagtaaagaatagagttgtggttgggaatggtgtctcacgcctgtaatcccagcacaatggcatgccgaggcgggtcaatcacctgtagtcgggaggtggagatcaccctgaccaacatggagaaatcccgactctactaaaaatacaaatcagcctgtcatagaggcacatgcctttaatcccagctactcgggaggctgaggcaggagaatcacttgaacctaggaggcagaggttgcggtgagccgagatcgcgccattgcactccagcctgggcaacaaaagctaaattctatatcaaaaaattaaaaaaaaaaaaaaaagaaggctgtttgttgaccatttgagtggccagtcttggtgcttcctggtgggcgaggagagccctaccccattcctacccattccagtagtcatggcataagagtgattctcgctttctgctatagcctccttatccattggctgaaatgattcttttttaatgtgtcttataaatgcttccatagcaaaaaaaattgaattgacttttatagggactctttcggggattgttacccatcattccataatttgtttgtactcctagaaaagggaagtatgccgagcacagtggatatttcgtctcaaataataaataaataaccaaatagaaaagaaagaaaaggaagtaaagggaaatatacaaatatacaaggtgttaggagagagttgctaatcgtgattcccccttaattgtccaaacagaccacctctggggatctattcgtaaaagactcgttagaagtgcagactcatgcatttgagaatcactcagggaaatctgaagatgacctgtggtgggggtgtaaatggatacttaaatgtgtcttgtgattgtgtgagagtgtgactgtgtgtttgtgtgtgtgctgtcatctgtggagtgggggatcctcttttgccttgagaaagctcatctctgtccacttactctgggctctaccatctgtgccttgtatccagtagaaataaaacagtttgcggcagaaatggagttttattttattttactttactttttattaggattatttgtagaccgggtctcactctgtcactcaggcgggagtgcaacggcacgatctcagatcactgcaacctgtgcctcctgcactgaagccatcctcccacctcagcctctggagtggggagatcccacacctgtgtaatttttgcattttttctagagatggggtttcctcatgctgcccgggctggtttccaacgcccgggctcaagtgatccacccgcctcagcctcccaaagtgctgggattacaggtgggagctactgtgcccggccagaaatggagatttttgttcttcttttgatgagacggaacctcgcaccgtggcccaggctggagtgcagtggagtgacctcggctcactgcaagctctgcctcctggggtcatgccattctcctgcctcagcctcccaaagagctgggactacaggcgcccgacaccacgcccagctaaggtttttgcatttatttttttattttttttgtagggacgggctttcaccgtgttagccaggacggtctcgatctcctgccctcgtgatgcacccgcctgagcctcccgaagtgctcggattacaggcatgagccaccatgcacggcccagaaatggagatttttgagcaaacacattaaagaaaagaaacgcaaatagacgaaactcattttaacatttttatttaacccaaggaatacagatataatcaacaccaatacaattgatgtcacagtgatgactaagatacatgctacaatccttcattctcagatgcaaaatctagtatgtgttttacagcaaacgtcagttggaaactgaacgtcgatcacacatgcttgatgtgcatgtcaatttcatgagagttacaatctcaggagaagtctcacatagcgtaagagtccaaacataccttcaagtgtttcgacaagttcttcactactcattcttagaactgaatttaccaacaacaatcccagcctattcattgctgaactgcatcccattgaaagaatgggtcacagttcctctctctagacactgtggaacgacattgaaggcccctccatcttttggcgattgtgaggacaggtgctagaagcctctgccctcagccttgtccacgtgagttctaattcctttagaacaactatctcagggtgggaaagatggttccaatgctaagtgcctattgcattgattatgaatcaatgaaactctttctccctgggggttgtcccagttggattccaagcagcactgtcagagtgttccagcttctccacatgctccgcagcccttgggatggtgagtgattgtctcggtggcttctgggagagcttcttggttgttgttgaaggtgtatttgacgtgcatttccccaggggagggacagtgaacgctttttgaagtggttctttacatcccctttgaggaaatgtctgctcaagtctctggctgggttttgaacagaatcatttgtttgttccattggagttttgacaactctgtgtattctgagcatgagcagtccttgcacgtatatgagatttgcaaatattttgtgccccaatctcaaggttgctctttgatacaaatcaagagcatctgaggcagagcaaaggttcaggtgagaggacggagcatttctccacctctccagcatgcgcagcatctctctcctccgagatgccgagacatgtgtgcagggagacaccatgaaaaagcaggtgtgcttcattctgaatagagcgtctctgattcccgtctggtgcctgagggtgcatggcccatgagccttagaagagacgtcttcgggccttgcacgttggcctccatagaaacttgtggcaaattctgggctccggactgggtgatggaggtagaggtctgagggcagaggtgggcaggggctccaggccatggagatccaagtggaattcttcaggcagagcctgtctccagggactaggcttgggcatttgggatgagccctgggggacggccgctctgtagtcaggtttgaggtagaggacacgccaggaagaagggctgactccatgcacaaggtttgctgggggtcccatcaggggcaggaagccttggggagcctcaccctcttctactgaaggcgccacacacacattctctgctctctgggctctcacagatccattttcaatgtcaatctcccagacagtctctgtactagtgagcaggagccagcgggcatgggcagggtacaagagatccttcagggacatcaagagttgctcagggaccaccaggagctgcacattgaggaggctgagtcgcagggctccctgtgggtccagccccaggaactcctgccccaggcgcaggtgcaggaccattcctggttccaagaccgcgatgatcatcttcctctggggaagctgtgggccctgggggagaaaagccgtgggtcagtcattgtcctctgagggtggctcaaacagggagagagcaaggcggggagctgccagtaacttccccaggcataaatgaaaccccgcagggacacccagaattggcacctgtattgacgccccttgggacggtgatttcctgcaagtcccctagggcctggagctcaggcagacctgtctcacccacgcccacctaggtggtgtgaccttacctggggcagctccaggggcagctgtgcagggtggtggggagctggctgtaccggagctggttctgcacctgtggagagagcagagtgtgcaggtgaaagcccttgtcatgcaggatgcccttgagggttcaaggtgccaccgtgagaaagaccaaatacagaagaagccaggtacaggacacccagccacggagctgcaggaggaagctcccgacactctggacagcacagctgctcgcctcatgacgtgacgggacactggcttggtagcaggggactcaggatgaaaaagagaagatgcctcacctggatgaggacccagctcctccactttctggcgttttggggcatttgatggcgtgccgctggagctgtaggacagagagagagacacagtcagatttcgggcagttccctaacgtccaattccctgaatccccacaaattcactccacttccctgcctttcattcaaggccacagactcgtcatccacttcctgtgagacctgctcccaatctgtcctaactcccagctgttcttgttctcaccccatctacctgagcttccctgggtgaagaaaaggcagggaaggagggtcggtgcccacagggagcagtttaccctttcaggagctcatgcagatgagagttggaaaactctccttgggtgtgaggagctggagaaagatgttgagatcccggagaggtggcacctctgtctacacaggtaacaaaggaatggggtcttaggattcgaatcacagcaggagaagaggaaggaatttgtcgggcatgacggcatgcgcctgtaatcccagcactttgggaggccaaggtcggaggattgcttgagtccaggagtttgagagcagcctgggcaacatggtgaaagctagtctccactaaaaatactaaacattagtgggtcatggtggtgcatgcctgtggtctcacctactcaggaggctcaggtgggaggatcacctgcgactcagaggtggagcccgcagtcagctaaaatcacgccactgcactccagtgtggaccatcggagtgagacgctgtctcaataaaataaatcagtaaataagacaaatagaaaaattaaaaatgaaaaaaggaggaaactgttttatttttcctagtagatcttgaaactctcacatcatgtcctacaatctcccttcttgcagaacacagaacccattccctgtggagctggttgggtggattgaaagtggggctgccctgagatatgtgtgtggttgcgatgtagaagccttcccagcaccctgtgatgacttacgggcacctcacttccctctggccccaaattcaaaacatccaatctcatggcaggttcatgcacccttttcccttcccctctctccaacacacacccacacatcccacaggcaggtcaccccgcaggcgtccccagcacatagcaaagctcacccgctctctcctgcgtggtcgctcttggattcggtgcaggaatcactggggcttcttgggcgccgggaacctttcatggtgaaaatttccagggttctccaagtcagccactgccagtgtttgtctgtctcctgcaaagatttcttcttggctcccgaatcctttagttcctttgagagagtggtgtcagccccaaagctgctcccgaaggcttgggatgtgtagcgacggggctgtggccagcggcaggtggatgaggctctgacaactgagctcttgggggaatcttgtacactgtcagcagggggtggagccaggggatttgtcagcaggaactgatgtgattggctgttcctggtatgacaacgggaggggccctcatggaggattggggcgtaactcaatccatagatgaccgatcaacagaacctgcctaatcccatcaagagccaacctgtttcctgtcccctcccatcctctaggtcttgcctaataatgatagacactttctgtcatacccaattcatccatcgctgaaatagtttttcatgtgtgccttttatattttcatgcaataaaaatatgttaattttcacggtggctatcctggggaatgctatgtacatgaaatgaagtgtcaaaggagcagaagcagaaggaaattcacaagcttctctgagcgtctctgcttcaattcctgccatgtttcctaaacatgttggcttctttcttcctacccaagtaagaaggtgcttcagaagttcaatcttagggcatttgacaaacgccgctgagaatttcaggatgacacgaaggaacctttgattggatttgtggatgtgcctgtgaaagcgtgtgtgtgtgtgtgtgtgtgtgtgtgtgtgtgtgtgtgtgtgtgaagccaggatgaagtggctgttcctggggtggagacccttctttctcttgagaatgttcattgctgttgactcattgtgggttttggagatattttctctctttctttcgttctttcagacattttttgctttctccctccctcgatcctaacccccctccatccccccctcactccctccctccctctttccatccttcctccctcccttccctctttccttccttcctgccttcttcccttccccttcccctcttccacgcctgtaatcccagcacaatggcatgccgaggcgggtcaatcacctgtagtcgggaggtggagatcaccctgaccaacatggagaaacccgactctactaaaaatacaaatcagcctgtcatagaggcacatgcctttaatcccagctactcgggaggctgaggcaggagaatcacttgaacctaggaggcagaggttgcggtgagccgagatcgcgccattgcactccagcctgggcaacaaaagctaaattctatatcaaaaaattaaaaaaaaaaaaaagaaggctgtttgttgaccatttgagtggccagtcttggtgcttcctggtgggcgaggagagccctgccccattcctacccattccagtagtcatggcataagagtgattctcactttctgctatagcctccttatccattggctgaaatgattgttttttaatgtgtcttataaatgcttccatagcaaaaaaaattgaattgacttttatagggactctttcgggtattgttacccatcattctataatttgtttgtactcctagaaaagggaagtatgccgagcacagtggatatttcgtctcaaataacaaataaataaccaaatagaaaagaaagaaaaggaagtaaagggaaatatacaaatatacaaggtgttaggagagagttgctaatcgtgattcccccttaattgtccaaacagaccacctctggggatctattcgtaaaagactcgttagaagtgcagactcatgcatttgagaatcactcagggaaatctgaagatgacctgtggtgggggtgtaaatggatacttaaatgtgtcttgtgattgtgtgagagtgtgactgtgtgtttgtgtgtgtgctgtcatctgtggagtgggggatcctcttttgccttgagaaagctcatctctgtccacttactctgggctctaccatctgtgccttgtatccagtagaaataaaacagtttgcggcagaaatggagttttattttattttactttactttttattaggattatttgtagaccgggtctcactctgtcactcaggctggagtgcaacggcacgatctcagatcactgcaacctgtgcctcctgcactgaagccatcctcccacctcagcctctggagtggggagatcccacacctgtgtaatttttgcattttttctagagatggggtttcctcatgctgcccgggctggtttccaacgcccgggctcaagtgatccacccgcctcagcctcccaaagtgctgggattacaggtgggagctactgtgcccggccagaaatggagatttttgttcttcttttgatgagacggaacctcgcaccgtggcccaggctggagtgcagtggagtgacctcggctcactgcaagctctgcctcctgaggtcatgccattctcctgcctcagcctcccaaagagctgggactacaggcgcccgacaccacgcccagctaaggtttttgcatttattttttttttttttgtagggacgggctttcaccgtgttagccaggacggtctcgatctcctgccctcgtgatgcacccgcctgagcctcccgaagtgctcggattacaggcatgagccaccatgcacggcccagaaatggagatttttgagcaaacacattaaagaaaagaaacgcaaatagacgaaactcattttaacatttttatttaacccaaggaatacagatataatcaacaccaatacaattgatgtcacagtgatgactaagatacatgctacaatccttcattctcagatgcaaaatctagtatgtgttttacagcaaacgtcagttggaaactgaacgtcgatcacacatgcttgatgtgcatgtcaatttcatgagagttacaatctcaggagaagtctcacatagcgtaagagtccaaacataccttcaagtgtttcgacaagttcttcactactcattcttagaactgaatttaccaacaacaatcccagcctattcattgctgaactgcatcccattgaaagaatgggtcacagttcctctctctagacactgtggaacgacattgaaggcccttccatcttttggcgattgtgaggacaggtgctagaagcctctgccctcagccttgtccacgtgagttctaattcctttagaacaactatctcagggtgggaaagatggttccaatgctaagtgcctattgcattgattatgaatcaatgaaactctttctccctgggggttgtcccagttggattccaagcagcactgtcagagtgttccagcttctccacatgctccgcagcccttgggatggtgagtgattgtcacggtggcttctgggagagcttcttggttgttgttgaaggtgtatttgacgtgcatttccccaggggagggacagtgaacgctttttgaagtggttctttacatcccctttgaggaaatgtctgctcaagtctctggctgggttttgaacagaatcatttgtttgtcccattggagttttgacaactctgtgtattctgagtatgagcagtccttgcacgtatatgagatttgcaaatattttgtgccccaatctcaaggttgctctttgatacaaatcaagagcatctgaggcagagcaaaggttcaggtgagaggacggagcatttctccacctctccagcatgcgcagcatctctctcctccgagatgccgagacatgtgtgcagggagacaccatgaaaaagcaggtgtgcttcattctgaatagagcgtctctgattcccgtctggtgcctgagggtgcatggcccatgagccttagaagagacgtcttcgggccttgcacgttggcctccatagaaacttgtggcaaattctgggctccggactgggtgatggaggtagaggtctgagggcagaggtgggcaggggctccaggccgtggagatccaagtggaattcttcaggcagagcctgtctccagggactaggcttgggcatttgggatgagccctgggggacggccgctctgtagtcaggtttgaggtagaggacacgccaggaagaagggctgactccatgcacaaggtttgctgggggtcccatcaggggcaggaagccttggggagcctcaccctcttctactgaaggcgccacacacacattctctgctctctgggctctcacagatccattttcaatgtcaatctcccagacagtctctgtactagtgagcaggagccagcgggcatgggcagggtacaagagatccttcagggacatcaagagttgctcagggaccaccaggagctgcacattgaggaggctgagtcgcagggctccctgtgggtccagccccaggaactcctgccccaggcgcaggtgcaggaccattcctggttccaagaccgcgatgatcatcttcctctggggaagctgtgggccctgggggagaaaagccgtgggtcagtcattgtcctctgagggtggctcaaacagggagagagcaaggcggggagctgccagtaacttccccaggcataaatgaaaccccgcagggacacccagaattggcacctgtattgacgccccttgggacggtgatttcctgcaagtcccctagggcctggagctcaggcagacctgtctcacccacgcccacctaggtggtgtgaccttacctggggcagctccaggggcagctgtgcagggtggtggggagctggctgtaccggagctggttctgcacctgtggagagagcagagtgtgcaggtgaaagcccttgtcatgcaggatgcccttgagggttcaaggtgccaccgtgagaaagaccaaatacagaagaagccaggtacaggacacccagccacggagctgcaggaggaagctcccgacactctggacagcacagctgctcgcctcatgacgtgacgggacactggcttggtagcaggggactcaggatgaaaaagagaagatgcctcacctggatgaggacccagctcctccactttctggcgttttggggcatttgatggcgtgccgctggagctgtaggacagagagacacagtcagatttcgggcagttccctaacgtccaattccctgaatccccacaaattcactccacttccctgcctttcattcaaggccacagactcgtcatccacttcctgtgagacctgctcccaatctgtcctaactcccagctgttcttgttctcaccccatctacctgagcttccctgggtgaagaaaaggcagggaaggagggtcggtgcccacagggagcagttgaccctttcaggagctcatgcagatgagagttggaaaactctccttgggtgtgaggagctggagaaagatgttgagatcccggagaggtggcacctctgtctacacaggtaacaaaggaatggggtcttaggattcgaatcacagcaggagaagaggaaggaatttgtcgggcatgacggcatgcgcctgtaatcccagcactttgggaggccaaggtcggaggattgcttgagtccaggagtttgagagcagcctgggcaacatggtgaaagctagtctccactaaaaatactaaacattagtgggtcatggtggtgcatgcctgtggtctcacctactcaggaggctcaggtgggaggatcacctgcgactcagaggtggagcccgcagtcagctaaaatcacgccactgcactccagtgtggaccatcggagtgagacgctgtctcagtaaaataaatcagtaaataagacaaatagaaaaattaaaaatgaaaaaaggaggaaactgttttatttttcctagtagatcttgaaactctcacatcatgtcctacaatctcccttcttgcagaacacagaacccattccctgtggagctggttgggtggattgaaagtggggctgccctgagatatgtgtgtggttgcgatgtagaagccttcccagcaccctgtgatgacttacgggcacctcacttccctctggccccaaattcaaaacatccaatctcatggcaggttcatgcacccttttcccttcccctctctccaacacacacccacacatcccacaggcaggtcaccccgcaggcgtccccagcacatagcaaagctcacccgctctctcctgcgtggtcgctcttggattcggtgcaggaatcactggggcttcttgggcgccgggaacctttcatggtgaaaatttccagggttctccaagtcagccactgccagtgtttgtctgtctcctgcaaagatttcttcttggctcccgaatcctttagttcctttgagagagtggtgtcagccccaaagctgctcccgaaggcttgggttgtgtagcgacggggctgtggccagcggcaggtggacgaggctccgacaactgagctcttgggggaatcttgtacactgtcagcagggggtggagccaggggatttgtcagcaggaactgatgtgattggctgttcctggtatgacaacgggaggggccctcatggaggattggggcgtaactcaatccatagatgaccgatcaacagaacctgcctaatcccatcaagagccaacctgtttcctgtcccctcccatcctctaggtcttgcctaataatgatagacactttctgtcatacccaattcatccatcgctgaaatagtttttcatgtgtgccttttatattttcatgcaataaaaatatgttaattttcacggtggccatcctggggaatgctatgtacatgaaatgaagtgtcaaaggagcagaagcagaaggaaattcacaagcttctctgagcgtctctgcttcaattcctgccatgtttcctaaatatgttggcttctttcttcctacccaagtaagaaggtgcttcagaagatcaatcttatggcatttgacaaaccctgctgagaatttcaggatgacacgaaggaacctttgattggatttgtggatgtgcctgtgaaagcgtgtgtgtgtgtgtgtgtgtgtgtgtgtgtgtgtgtgtgaagccaggatgaagtggctgttcctggggtggagacccttctttctcttgagaatgttcattgctgttgactcattgtgggttttggagatattttctctctttctttcgttctttcagacattttttgctttctccctccctggatcctaacccccctccatcccccccctcactccctccctccttgtttccatccttcctccctcccttccctctttccttccttcctgccttcttcccttccccttcccctcttccttctgtccttccttcctgtgtgtaaaagaaaaattggtgaatagaagaataattgaataactgcctgagtcacttatacatttctcatctcactctggggacacagaagaccgtgttgtactcatctcctcgattttaaaaacagtcattctaaaatcaaggattctagatgtatcacttctaggcgaaatcttgaaagagaatgtgtaagagtttcatgtgctcttcatctctatgatcacaattgaagaaggcaggaggttgagatgctgcatcgccaagatcgtggtgattccattatcattacccttgtaacttgtgagcatccttactgccagcaatcattattagatatggaatctgatataggagttcatatttactgtatgaatatcttggtgtgggagtgttggctcatgcctgtaatcccagtgctttgggaggcagaggcaggaggctcgcttgaacccaggagttcgagacaagccggaagagcatggcgagaccctcgtctctacaaaaatgtaaaaatcagccaagtgtgctggtaggtgcctgtagtctcagctccttaggaggctgaagtgttaggatcgctttcgcccgggatgtaatggctacagggagtcgagatcttgccactgaacttcagcctgggcaacagagcaagactctctctcaaaaataaaatgctttttcctttaggcttaaattctaacactcaaacctccaaagcggaggtattaggaggtggggcccttgggagatgatgagattatgaaagtggaaccctcgtaaatgggattagtgcccttctgaaagtgacggaagagagctcgccagcaccttccatgtggggagacagggaggatatgacagtctccaacctggaagagggtcctcaccagaccccgatcatgctggcactctcatcgtggacttccggcctccagaactctgatcaacaaatgtgtgttcttaaagaaaaaaaaagtgtggaaagcaatgttaatgttcccaatcactttgagtacattctttccttaactatgtcttaatgcatagttgtgttggatggcctagtttgtaatgttagaatatgcatgttagtgaattaataaatacagcagtaaagaatagagttgtggttgggaatggagtctcacgcctgtaatcccagcacaatggcatgccgaggcgggtcaatcacctgtagtcgggaggtggagatcaccctgaccaacatggagaaacccgactctactaaaaatacaaatcagcctgtcatagaggcacatgcctttaatcccagctactcgggaggctgaggcaggagaatcacttgaacctaggaggcagaggttgcggtgagccgagatcgcgccattgcactccagcctgggcaacaaaagctaaattctatatcaaaaaattaaaaaaaaaaaaaagaaggctgtttgttgaccatttgagtggccagtcttggtgcttcctggtgggcgaggagagccctgccccattcctacccattccagtagtcatggcataagagtgattctcactttctgctatagcctccttatccattggctgaaatgattcttttttaatgtgtcttattaatgcttccatagcaaaaaatattgaattgacttttatagggactctttcggggattgttacccatcattccataatttgtttgtactcctagaaaagggaagtatgccgagcacagtggatatttcgtctcaaataataaataaataaccaaatagaaaagaaagaaaaggaagtaaagggaaatatacaaatatacaaggtgttaggagagagttgctaatcgtgattcccccttaattgtccaaacagaccacctctggggatctattcgtaaaagactcgttagaagtgcagactcatgcatttgagaatcactcagggaaatctgaagatgacctgtggtgggggtgtaaatggatacttaaatgtgtcttgtgattgtgtgagagtgtgactgtgtgtttgtgtgtgtgctgtcatctgtggagtgggggatcctcttttgccttgagaaagctcatctctgtccacttactctgggctctaccatctgtgccttgtatccagtagaaataaaacagtttgcggcagaaatggagttttattttatttcactttactttttattaggattatttgtagaccgggtctcactctgtcactcaggctggagtgcaatggcacgatctcagatcactgcaacctgtgcctcctgcactgaagccatcctcccacctcagcctctggagtggggagatcccacacctgtgtaatttttgcattttttctagagatggggtttcctcatgctgcccgggctggtttccaacgcctgggctcaagtgatccacccgcctcagcctcccaaagtgctgggattacaggtgggagctactgtgcccggccagagatggagatttttgttcttcttttgatgagacggaacctcgcaccgtggcccaggctggagtgcagtggagtgacctcggctcactgcaagctctgcctcctggggtcatgccattctcctgcctcagcctcccaaagagctgggactacaggcgcccgacaccacgcccagctaaggtttttgcatttttttttttttttgtagggacgggctttcaccgtgttagccaggacggtctcgatctcctgccctcgtgatgcacccgcctgagcctcccgaagtgctcggattacaggcatgagccaccatgcacggcccagaaatggagatttttgagcaaacacattaaagaaaagaaacgcaaatagacgaaactcattttaacatttttatttaacccaaggaatacagatataatcaacaccaatacaattgatgtcacaatgatgactaagatacctgctacaatccttcattctcagatgcaaaatctagtatgtgttttacagcaaacgtcagttggaaactgaacgtcgatcacacatgcttgatgtgcatgtcaatttcatgagagttacaatctcaggagaagtctcacatagcgtaagagtccaaacataccttcaagtgtttcgacaagttcttcactactcattcttagaactgaatttaccaacaacaatcccagcctattcattgctgaactgcatcccattgaaagaatgggtcacagttcctctctctagacactgtggaacgacattgaaggcccctccatcttttggcgattgtgaggacaggtgctagaagcctctgccctcagccttgtccacgtgagttctaattcctttagaacaactatctcagggtgggaaagatggttccaatgctaagtgcctattgcattgattatgaatcaatgaaactctttctccctgggggttgtcccagttggattccaagcagcactgtcagagtgttccagcttctccacatgctccgcagcccttgggatggtgagtgattgtcacggtggcttctgggagagcttcttggttgttgttgaaggtgtatttgacgtgcatttccccaggggagggacagtgaacgctttttgaagtggttctttacatcccctttgaggaaatgtctgctcaagtctctggctgggttttgaacagaatcatttgtttgtcccattggagttttgacaactctgtgtattctgagtatgagcagtccttgcacgtatatgagatttgcaaatattttgtgccccaatctcaaggttgctctttgatacaaatcaagaacatctgaggcagagcaaaggttcaggtgagaggacggagcatttctccacctctccagcatgcgcagcatctctctcctccgagatgccgagacatgtgtgcagggagacaccatgaaaaagcaggtgtgcttcattctgaatagagcgtctctgattcccgtctggtgcctgagggtgcatggcccatgagccttagaagagacgtcttcgggccttgcacgttggcctccatagaaacttgtggcaaattctgggctccggactgggtgatggaggtagaggtctgagggcagaggtgggcaggggctccaggccgtggagatccaagtggaattcttcaggcagagcctgtctccagggactaggcttgggcatttgggatgagccctgggggacggccgctctgtagtcaggtttgaggtagaggacacgccaggaagaagggctgactccatgcacaaggtttgctgctccaagtcagccactgccagtgtttgtctgtctcctgcaaagatttcttcttggctcccgaatcctttagttcctttgagagagtggtgtcagccccaaagctgctcccgaaggcttgggttgtgtagcgacggggctgtggccagcggcaggtggatgaggctctgacaactgagctcttgggggaatcttgtacactgtcagcagggggtggagccaggggatttgtcagcaggaactgatgtgattggctgttcctggtatgacaacgggaggggccctcatggaggattggggcgtaactcaatccatagatgaccgatcaacagaacctgcctaatcccatcaagagccaacctgtttcctgtcccctcccatcctctagctcttgcctaataatgatagacactttctgtcatacccaattcatccatcgctgaaatagtttttcatgtgtgccttttatattttcatgcaataaaaatatgttaattttcacggtggctatcctggggaatgctatgtacatgaaatgaagtgtcaaaggagcagaagcagaaggaaattcacaagcttctctgagcgtctctgcttgaattcctgccatgtttcctaaacatgttggcttctttcttcctacccaagtaagaaggtgcttcagaagatcaatcttagggcatttgacaaacgctgctgagaatttcaggatgacacgaaggaacctttgattggatttgtggatgtgcctgtgaaagcgtgtgtgtgtgtgtgtgtgtgtgtttgtgtgtgtgtgaagccaggatgaagtggctgttcctggggtggagacccttctttctcttgagaatgttcattgctgttgactcattgtgggttttggagatattttctctctttctttcgttctttcagacattttttgctttctccctccctcgatcctaacccccctctttccccccctcactccctccctccctctttccatccttcctccctcccttccctctttccttccttcctgccttcttcccttccccttcccctcttccttccgtccttccttcctgtgtgtaaaagaaaaattggtgaatagaagaataattgaataactgcctgagtcacttatacatttctcatctcactctggggacacagaagaccgtgttatactcatctcctcgattttaaaaacagtcattctaaaatcaaggattctagatgtatcacttctaggcgaaatcttgaaagaaaatgtgtaagagtttcatgtgctctttatctctatgatcacaattgaagaaggcaggaggttgagatgctgcatcgccaagatcgtggtgattccattatcattacccttgtaacttgtgagcatccttaccgccagcaatcattattagatatggaatctgatataggagttcatatttactgtatgaatatcttggtgtgggagtgttggctcatgcctgtaatcccagtgctttgggaggcagaggcaggaggctcgcttgaacccaggagttcgagacaagccggaagagcatggcgagaccctcgtctctacaaaaatgtaaaaatcagccaagtgtgctggtaggtgcctgtagtctcagctccttaggaggctgaagtgttaggatcgctttcgcccgggatgtaatggctacagggagtcgagatcttgccactgaacttcagcctgggcaacagagcaagactctctctcaaaaataaaatgctttttcctttaggcttaaattctaacactcaaacctccaaagcggaggtattaggaggtggggcccttgggagatgatgagattatgaaagtggaaccctcgtaaatgggattagtgcccttctgaaagtgacggaagagagctcgccagcaccttccatgtggggagacagggaggatatgacagtctccaacctggaagagggtcctcaccagaccccgatcatgctggcactctcatcgtggacttccggcctccagaactctgatcaacaaatgtgtgttcttaaagaaaaaaaaagtgtggaaagcaatgttaatgttcccaatcactttgagtacattctttccttaactatgtcttaatgcatagttgtgttggatggcctagtttgtaatgttagaatatgcatgttagtgaattaataaatacagcagtaaagaatagagttgtggttgggaatggtgtctcacgcctgtaatcccagcacaatggcatgccgaggcgggtcaatcacctgtagtcgggaggtggagatcaccctgaccaacatggagaaatcccgactctactaaaaatacaaatcagcctgtcatagaggcacatgcctttaatcccagctactcgggaggctgaggcaggagaatcacttgaacctagaaggcagaggttgcggtgagccgagatcgcgccattgcactccagcctgggcaacaaaagctaaattctatagcaaaaaattaaaaaaaaaaaaaagaaggctgtttgttgaccatttgagtggccagtcttggtgcttcctggtgggcgaggagagccctgccccattcctacccattccagtagtcatggcataagagtgattctcactttctgctatagcctccttatccattggctgaaatgattcttttttaatgtgtcttattaatgcttccatagcaaaaaaaattgaattgacttttatagggactctttcggggattgttacccatcattccataatttgtttgtactcctagaaaagggaagtatgccgagcacagtggatatttcgtctcaaataataaataaataaccaaatagaaaagaaagaaaaggaagtaaagggaaatatacaaatatacaaggtgttaggagagagttgctaatcgtgattcccccttaattgtccaaacagaccacctctggggatctattcgtaaaagactcgttagaagtgcagactcatgcatttgagaatcactcagggaaatctgaagatgacctgtggtgggggtgtaaatggatacttaaatgtgtcttgtgattgtgtgagagtgtgactgtgtgtttgtgtgtgtgctgtcatctgtggagtgggggatcctcttttgccttgagaaagctcatctctgtccacttactctgggctctaccatctgtgccttgtatccagtagaaataaaacagtttgcggcagaaatggagttttattttattttactttactttttattaggattatttgtagaccgggtctcactctgtcactcaggcgggagtgcaacggcacgatctcagatcactgcaacctgtgcctcctgcactgaagccatcctcccacctcagcctctggagtggggagatcccacacctgtgtaatttttgcattttttctagagatggggtttcctcatgctgcccgggctggtttccaacgcccgggctcaagtgatccacccgcctcagcctcccaaagtgctgggattacaggtgggagctactgtgcccggccagaaatggagatttttgttcttcttttgatgagacggaacctcgcaccgtggcccaggctggagtgcagtggagtgacctcggctcactgcaagctctgcctcctggggtcatgccattctcctgcctcagcctcccaaagagctgggactacaggcgcccgacaccacgcccagctaaggtttttgcatttttttttttttttttgtagggacgggctttcaccgtgttagccaggacggtctcgatctcctgccctcgtgatgcacccgcctgagcctcccgaagtgctcggattacaggcatgagccaccatgcacggcccagaaatggagatttttgagcaaacacattaaagaaaagaaacgcaaatagacgaaactcattttaacatttttatttaacccaaggaatacagatataatcaacaccaatacaattgatgtcacaatgatgactaagatacatgctacaatccttcattctcagatgcaaaatctagtatgtgttttacagcaaacgtcagttggaaactgaacgtcgatcacacatgcttgatgtgcatgtcaatttcatgagagttacaatctcaggagaagtctcacatagcgtaagagtccaaacataccttcaagtgtttcgacaagttcttcactactcattcttagaactgaatttaccaacaacaatcccagcctattcattgctgaactgcatcccattgaaagaatgggtcacagttcctctctctagacactgtggaacgacattgaaggcccctccatcttttggcgattgtgaggacaggtgctagaagcctctgccctcagccttgtccacgtgagttctaattcctttagaacaactatctcagggtgggaaagatggttccaatgctaagtgcctattgcattgattatgaatcaatgaaactctttctccctgggggttgtcccagttggattccaagcagcactgtcagagtgttccagcttctccacatgctccgcagcccttgggatggtgagtgattgtcacggtggcttctgggagagcttcttggttgttgttgaaggtgtatttgacgtgcatttccccaggggagggacagtgaacgctttttgaagtggttctttacatcccctttgaggaaatgtctgctcaagtctctggctgggttttgaacagaatcatttgtttgtcccattggagttttgacaactctgtgtattctgagtatgagcagtccttgcacgtatatgagatttgcaaatattttgtgccccaatctcaaggttgctctttgatacaaatcaagagcatctgaggcagagcaaaggttcaggtgagaggacggagcatttctccacctctccagcatgcgcagcatctctctcctccgagatgccgagacatgtgtgcagggagacaccatgaaaaagcaggtgtgcttcattctgaatagagcgtctctgattcccgtctggtgcctgagggtccatggcccatgagccttagaagagacgtcttcgggccttgcacgttggcctccatagaaacttgtggcaaattctgggctccggactgggtgatggaggtagaggtctgagagcagaggtgggcaggggctccaggccgtggagatccaagtggaattcttcaggcagagcctgtctccagggactaggcttgggcatttgggatgagccctgggggacggccgctctgtagtcaggtttgaggtagaggacacgccaggaagaagggctgactccatgcacaaggtttgctgggggtcccatcagggtcaggaagccttgcggagcctcaccctcttttactgaaggcgccacacacacattctctgctctctgggctctcacagatccattttcaatgtcaatctcccagacagtctctgtactagtgagcaggagccagcgggcatgggcagggtacaagagatccttcagggacatcaagagttgctcagggaccaccaggagctgcacattgaggaggctgagtcgcagggctccctgtgggtccagccccaggaactcctgccccaggcgcaggtgcaggaccattcctggttccaagaccgcgatgatcatcttcctctggggaagctgtgggccctgggggagaaaagccgtgggtcagtcattgtcctctgagggtggctcaaacagggagagagcaaggcggggagctgccagtaacttccccaggcataaatgaaaccccgcagggacacccagaattggcacctgtattgacgccccttgggacggtgatttcctgcaagtcccctagggcctggagctcaggcagacctgtctcacccacgcccacctaggtggtgtgaccttacctggggcagctccaggggcagttgtgcagggtggtggggagctggctgtaccggagctggttctgcacctgtggagagagcagagtgtgcaggtgaaagcccttgtcatgcaggatgcccttgagggttcaaggtgccaccgtgagaaagaccaaatacagaagaagccaggtacaggacacccagccacggagctgcaggaggaagctcccgacactctggacagcacagctgctcgcctcatgacgtgacgggacactggcttggtagcaggggactcaggatgaaaaagagaagatgcctcacctggatgaggacccagctcctccactttctggcgttttggggcatttgatggcgtgccgctggagctgtaggacagagagagagacacagtcagatttcgggcagttccctaacgtccaattccctgaatccccacaaattcactccacttccctgcctttcattcaaggccacagactcgtcatccacttcctgtgagacctgctcccaatctgtcctaactcccagctgttcttgttctcaccccatctacctgagcttccctgggtgaagaaaaggcagggaaggagggtcggtgcccacagggagcagtttaccctttcaggagctcatgcagatgagagttggaaaactctccttgggtgtgaggagctggagaaagatgttgagatcccggagaggtggcacctctgtctacacaggtaacaaaggaatggggtcttaggattcgaatcacagcaggagaagaggaaggaatttgtcgggcatgacggcatgcgcctgtaatcccagcactttgggaggccaaggtcggaggattgcttgagtccaggagtttgagagcagcctgggcaacatggtgaaagctagtctccactaaaaatactaaacattagtgggtcatggtggtgcatgcctgtggtctcacctactcaggaggctcaggtgggaggatcacctgcgactcagaggtggagcccgcagtcagctaaaatcacgccactgcactccagtgtggaccatcggagtgagacgctgtctcagtaaaataaatcagtaaataagacaaatagaaaaattaaaaatgaaaaaaggaggaaactgttttatttttcctagtagatcttgaaactctcacatcatgtcctacaatctcccttcttgcagaacacagaacccattccctgtggagctggttgggtggattgaaagtggggctgccctgagatatgtgtgtggttgcgatgtagaagccttcccagcaccctgtgatgacttacgggcacctcacttccctctggccccaaattcaaaacatccaatctcatggcaggttcatgcacccttttcccttcccctctctccaacacacacccacacatcccacaggcaggtcaccccgcaggcgtccccagcacatagcaaagctcacccgctctctcctgcgtggtcgctcttggattcggtgcaggaatcactggggcttcttgggcgccgggaacctttcatggtgaaaatttccagggttctccaagtcagccactgccagtgtttgtctgtctcctgcaaagatttcttcttggctcccgaatcctttagttcctttgagagagtggtgtcagccccaaagctgctcccgaaggcttgggttgtgtagcgacggggctgtggccagcggcaggtggatgaggctctgacaactgagctcttgggggaatcttgtacactgtcagcagggggtggagccaggggatttgtcagcaggaactgatgtgattggctgttcctggtatgacaacgggaggggccctcatggaggattggggcgtaactcaatccatagatgaccgatcaacagaacctgcctaatcccatcaagagtcaacctgtttcctgtcccctcccatcctctaggtcttgcctaataatgatagacactttctgtaatacccaattcatccatcgctgaaatagtttttcatgtgtgccttttatattttcatgcaataaaaatatgttaactttcacggtggctatcctggggaatgttatgtacacgaaatgaagtgtcaaaggagcagaagcagaaggaaattcacaagcttccctgagagtctctgcttgaattcctgccatgtttcctaaatatgttggcttcctacttcctacccaagtaagaaggtgcttcagaagatcaatcttaggacatttgacaaacgctactgagaatttcaggatgacaggaaggaacctttgattggatttgtggatgtgcctgtgaaagcgtgtgtgtgtgtgtgtgtgtgtgtgtgtgtgtgcgtgtgaagccaggatgaagtggctgttcctggggtggagacccttctttctcttgagaatgtccattgctgttgactcattgtgggttttggagatattttctctctttctttcgttctttctgacattttttgctttctccctccctcgatcctaaccccactccatccccccctcctcactccctccctccctctttccatccttcctccctcccttccctctttccttccttcctgccttcttcctttccccttcccctcttccttccgtccttccttcctgtgtgtaaaagaaaaattggtgaatagaagaataattgaataactgcctgagtcacttatacatttctcatctcactctggggacacagaagaccgtgttgtactcatctcctcgattttaaaaacagtcattctaaaatcaaggattctagatgtatcacttctaggcgaaatcttgaaagagaatgtgtaagagtttcatgtgctcttcatctctgtgatcacaattgaagaaggcatgagtttgagacgctgcatcaccaagatcgtggtgattccattgtcattacccttgtaacttgtgagcatccttactgccagcaatcattattagatatggaatctgatataggagttcatatttgctgtatgaatatcttgttctgggagtggtggctcatgcctgtcatcccagtgctttgggaggcagaggcaggaggctcgcttgagcccaggagttcgagacaagccgggacagcatagccagaccctcgtctctacaaaaatgtaaaaatcagccaagtgtgctggtaggtgcctgtaatctcagctacttaggaggctgaagtgttaggatcgcttgcgcccgggatgtcaaggctacagggagccgagatcgtgccactgaacttcagtctgggcaacagagcaagactctctctcaaaaataaaatactttttcctttaggcttaaattctaacactcaaacctccaatgtggcggtattaggaggtggggcccttgggagataatgagattatgaaagtggaaccctcgtaaatgggattagtgcccctctgaaagtgaccgaagagagctcgccagcaccttccatgtggggagacagggaggatatgacagtctccaacctggaagagggtcctcaccagaccccgatcatgctggcaccctcatcttcgacttccggcctccagaactctgatcaacaaatgtgtattcttaaagaaaaaaaaagtgtggaaagcaatgttaatgttcccaatcactttgagtacattctttccttaactatgtcttaatgcatagttgtcttggatggcctagtttgtaatattagtatatgcatatcagtgaattaataaatacagcagtgaagaatactgttctcgttggcaatggtggctctcgcctgtaatcccagcacaatgggtgggcaagtcgtgtcaatcatctgaagtcgggggttggagatcatcctgaccaacatggagaaatcccgactctactaaaaataccaatctgcctgtcatagtggcacgtgtctttaatcccagctacttcggaggctgaggcaggggaatcacttgaacctaggaggtagaggttgtggtgagctgagatcgtgtgcgtgcagtctatcctaggcaacaaaagctaaactctatctgaataaagaaaaaaaaaatgtaatggtgtttgttgaccatttgttcagctagtcttggtgcttccttgtgggccaggagagccctgctgcagcccccattcattccagtagacatggcagaagagtgattctcactttctgctatagcctcttcatccattggttgaaatgatttttttatatgtcttataaatgtttccacattaaaaaacgaattgaattttatagtgacgcttttggggattgttacccataatttgtttgaactcctaaaacatggaagtatgccaagcacagtggcttatgcctgtaatcccagcgctttgggtgggcggatgacctgatgtcaggagttcacgaccagcctgaccaatgtgggagaaatcctaactctactaaaaatacaaaaattagccgacgatggtggtgtgtacctgtattcccagctacttgggaggctgagacaggaaaattgcttgaacccaagaggcaaaagttgcagtgagctgagatggtgccatttcactccagactgtatgacagagggagattccatcttaaaaaaataaaaaaaggaattaaagggaaatatataagatgttgtgagagagtttctaattgtgattcctccataattgtccaaacagaccacctctgggggtctattcacaagagactctttagaagtggaaactcatgcatttgggaaacgctgggggaaatctgaagatgacctatggtgggggtataaatggattcgtacgtgtgttttttgattgtgtgagtgtgtgtgtgtgtgtgtgtgctgtcatctgtggagtgggggatcctcttttgccttgagaaagctcatctctgtccacttactctgggctctaccatctgtgccttgtatccagtagaaataaaacagtttgcggcagaaatggagttttattttattttactttactttttattaggattatttgtagaccgggtctcactctgtcactcaggctggagtgcaatggcacgatctcagatcactgcaacctgtgcctcctgcactgaagccatcctcccacctcagcctctggagtggggagatcccacacctgtgtaatttttgcatttgttctagagatggggtttcctcatgctgcccgggctggtctccaactcccgggctcaagcgatccacccgcttcagcctcctaaagtgctgggattacaggtgtgagctactgtgcgtggccagaaatggagattttcttttttttctccttttttttttttgaggcggagtcttgcactgttgcccaggctggagtgcagtggagtgacattggcgccctgcaagctctgcctcctcggttcacgccattctcctgaggggagggagggagggagggaaagaagaaagggagggagggaggaagggaggagaaaatgtccgaaggaaagaaagaaagaaagaaagagaaagaaagaaggaaagaaagaaagaaagagagagagaaaatgttcacaaaacccacaatgagttaccagcaatgaactttctccagacaaagaagggtctgcaccccaggaacagacacttcttcctggctacacacacacacacacacacacacacacacacacacacacacacacacacacgctttcataggcaatccagatatccagtcaaagattccttatttatttccctttacttcctttttttttttttttttgagacaaaatctccctctgtcttcgaggctggagtgcagtggcaccatctcagctcactgcaacttctgcctcctgggttcaagcaattgtcttgtctcagcctcccaagtagctgggactacaggtgcacaccaccatggttggctaatttttatatttttagtagagttggggttttcccacattggtcaggctggtcttgaactcctgacatcaggtgatccgcccgcctcagcctcccaaagtgctgggattacaagcatgagccactgtgctcggcatacttccattttttaggagttcaaacaaattatgggtaatgatccccaaaagagtcactataaaattcaattctttttttactatggaaacatttataagacactttaaaaaaatcatttcagccaatggataaagaggctatagcagagagtgagaatcactcttatgccatgtctactggaatgggttgggggtggggcagcgctctcctggctcaccaggaagcaccaagtctagctgatcaaatggtcaacaaacagcattctttttttttttttttttaattttttgagattcagtttagcgtttgttgcccaggctggagtgcaatggcgcgatctcggctcaccacaacctctgcctcccaggttcaagtgattctcctgcctcagcctcccgagcagtgggattaaaggcatgtgccactatggcagactgatttgtatttttagtagagtcgggatttctccatgttggtcaggctgatctccaactcccgactacaggtgattgaccagccttggccttccattgtgctgggattacaggcgtgagccaccattcccaacctgaacagtattctttattgctgtatttattaattcactaacatgcatattctaacattacaaactaggccatacaacacaactatgcattaagacatagttaaagaaagaatgtactcaaagtgattgggaacattaacactgctttccacgctttttttttttttaagaacagacatttgtttatcccagttctggaggctggaagtccaagatgagggtgccagcatgatcggggtctggtgaggaccctcttccaggttggagactgtcatatcctccctgtctcctcacatggaaggtgccggcgagctctcttctgtcactttcagaagggcactaatcccatctatgagggctccaccttcataacgtcatcatctccaaaaggccccagctcctaataccttcacattggaggtttgagggttagaatttaagcctaaagaataaaacattttatttttgagacagtcttgctctgttgcccaggctgaagttcagtggcacgatcttggctctctgtagccttgacatcccaggctcaagggatcctcccacttcagcctcccaaatagctgagactacaggcacctaccaccacacttggctgatttttaaattttttgttgagatggggtctcgctaaattgtcctggctggtctcgaactcttgggctcttgggctcaagtgagcctcctgcctctgcctcccaaagcactgggattacaggcatgagccaccactcccagaccaagatattcataccgtaaatatgaactcctatctcacatttgatatctaataatgattgctggcagtaaggatgctcacaagttacaagggtaatgataatggaatcaccacgatcttggtgatgcagcatctcaaactcatgccttcttcaattgtgatcacagagatgaagagcacatgaaactcttacacgttttctttcacgatttggcctagaagtgatacatctagtctccttgattttagaatgactgtttttaaaatcaaggagatgagtccaacacggtcttccgtgtgcccagaatgagttgagaactgtataaatgtctgaggcagttattcaattattcttctattcaccatttttttttgacacagtctcactctggcacccaggctggagtgcagtggtaaaatcttgactctctgccacctccacgtcccagcctcaagcgattctcgtgcctcagccacccaagtaactgggattacaggcgtgctccaccacacccagctaatttttgtatttttagtagagacgcggtttcgccaagttgcccaggctcgttttgaactcctgagctcagacgatctgtctgcctgggcctcccaaagtgctggaattacaggtgtgagccactgcgccaggcctgtttttgtaattttttttagagacaaggtctcactttgtggcccttactgctctgcatagtggttgaactaagcaacacagtacaagcgttctcttttctccacatccttaccagcatgtattattgtctgtcttttggatgtaagctaactggggtaaggtgatatctcctcatagttttgacttgcatttctctgatgatcaatgatgttgagcaccttttcataagcctgtttaccatttgtatatcttcttttgaaaaacgtctattcagaggccaggcgtggtgtctcatgcctgtaatcccagcactttgggaagccaaggtgggcggatcttctgaggtcaggagtttgagaccagcctggccaacgtgatgaaaccctgtgtctactaaaagtacaaaaactagctgggcgtggtggcggatgcctgtaatcccatctacttgggaggctgaggcaggagaatcgcttgtacctgggaggcggaggttgcagtgagctgagatcgtgccattgctctccagtctgggtgacagagtgagactctgtctaaaaataaaaaaataaaaaaataatctattcctgtcttttgcccattttcaaaatcaaattattagattttgtcctattgggtcaagcactgtgtctcacgcctgtaatgccagcactttggggggatgaggtgggaggattacctggggtcgggcgttcgagaccaggctggctaatatggtgaaatcctgtatctactaaaaatacacagattagtcaggcgtggtggcaggcacctgtactgccagctcctcaggaggctgaggccggagaattgcttgaacctgagaggtggaggttggggtgagctgagattgttccactgcactccagactgggcaatagactctgtctcagaaaaaaaaaaaaaaaggttgtgtgctattgagatgtttgagctccttttgtattttgaatcaatttctatattttacttatcacctgatagacacgctaaatgtgcatattttgatcaaatatctaagttgcacatgatttagtttctgttttcttcttgcttcctcagagttttgttagctttataatgtttaaatattagcttgatgatatattaatatttctaatatattgaggagttttcctaattcaaaagttagtcgagcaaaattctcttacgcatgtataatctattgttcacaggcctctaattaaatcgtcattgttaaactgttttgaaattctatctttatcacacattaggttttcaggagagaaatggttctaaaaacaaatgttcctccatcgatttactgtttttttttttttttttgagacggagtttcactctagttgcccaggctggagtgcagtggcgcgatctcggctcactgcaacctgcgcctcctgggttcaagcgattctcctgcctcagcctcccgagtagctgggattacaggtatgagccaccgtgcccaaccatctcaggtttttctgagcttggatccagtgtgttactttctagtgtcccgcacactacagtcccttccctgggatatgtggtgacccttccaagtcctcattattttcaacaaacttccttctcagctgtctcctttgtgaggcttttgggtctgtctgcttcttgcctaacccaatatcccctagccccaggcagatgctggtagtttgtgtctttcaatccttcagtagacactatccttgcctggaaagtcatgctagagttaactttaaaactaattgttacattactagccaggcatggcagctcacacctgtaatcccagcactttgggaggtcaaggcaggcagatcacttgaggccaccaggagttcgagaccagcctgaccagcatagtgaaacctcatctctactaaaaatacaaaaattagccgggtgtggtggcacacacctgtaatcccagctacttgggaagctgaggcaggtgaatcacttgaacctgggaggtggaggttgcagtgaaccgagatcatgccactgcactgtggcctgagtgacaagagtgagactctgtctcaaaaaacaaaaacaaaaacaaaaaaccaaaaagagatctatgttctatttgagataatggaaaaagggattttactgaccacacacaacaaggaatatagtctttctaaaaatagttggaaaagtcactgaacaaatggaaaaggggagcccaaagcaagccacaacaacaaaacctggggaagggggagaatccccctacaaatactttaacacaactatcttaaatatgttcaaagagctaagcaggcatgtccaagggagagaacatagtcatgtgtttttgtttctgtttctggttgggccagtaaagccccatcctcatccctcttttctgcttatcactagagacagaaactagaaaccatggattcaggctgctaaaagccaaaaacgaaagagaacaccatcaccaaaataaggcaggtcagacaagcttgaaagaaaacccttgacaaagatgtctcaatgacagagcaggtgcattgccatcttggacaaacaccactattttaagttccctttgattaaaaatcgcctaaatccagcccctaaaacatgagtctaatggctaatctcagcttgaccataaaccataaatgacacctttgaccagaaacattccaatgctgagataaactctcctccactcagaaaacattctgaacctgtgataagctctccctcactaaacttttctttttgagatggaatcttgctctgctgcccaggctggagtgcagtggcgtgatctcgcatcactgcaacctccgcttcccaggttcaagcgattctcctgcctcagcctcctgagtagatgggattacaggcacgtgccaccatgcctggctaatttttctatgtttatttttatttatttatttaattattattattttttcaaataaatttttttattattatactttaagttttagggtacatgtgcacaatgtgcaggttagttacatatgtgtacatgtgccatgctggtgtgctgcacccattaactcgtcatttagcattaggtatatctcctaatgctatccctccccactccccccatcccgcaacagtccccagagtgtgatattccccttcctgtgtccatgtgttctcattgttcaattcccatctatgagtgagaacatgcggtgtttggttttttgtccttgtgatagtttactgagaatgatgatttccaatttcatccatgtccctacaaaggacatgaactcatcattttttatggctgcatagtattccatggtgtatatgtgccacattttcttaatccagtctatcattgttggacatttgggttggttccaagtctttgctattgtgaatagtgccccaataaacatacgtgtgcatgtgtctttatagcagcatgatttatagtcctttgggtatatactcagtaatgggatggctgggtcaaatggtatttctagttctagatccctgaggaactgccacactgacttccacaatggttgaactagtttacagtcccaccaacagtgtgaaagtgttcctatttctccacatcctctccagcacctgttgtttcctgactttttaatgattgccattctaactagtgtgagatggtatctcattgtggttttgatttgcatttctctgatagccagtgatggtgagcattttttcatgtgttttttggctgcataaatgtcttcttttgagaagtgtctgttcatgtccttctcccactttttgttggggttgtttgctttttccttgtaaatgtgtttgagttcattgtagattctggatattagccctttgtcagatgagtaggttgtgaaaattttctcccattttataggttgcctgttcactccaatggtagtttcttttgctgtgcagaagctctttagtttaattagatcccatttgtcaattttggcttttgttgccattgcttttggtgttttagacatgaagtccttgctcatgcctatgtcctaaatggtaatgcctaggttttcttctagggtttttatggttttaggtctaacgtttaagtctttaatccatcttgaattaatttttgtataaggtgtaaggaagggatccagtttcagctttctacatatggctagccagttttcccagcaccatttattaaacagggaatcctttccccattgcttgtttttctcagatttgtcaaagatcagatagttgtagatatgtggtgttatttctgagggctctgttctgttccattgatctatatctctgttttggtaccagtaccatgctgttttggttgctgtagccttgtagtatagtttgaagtcaggtagcatgatgcctccagctttgttcttttggcttaggattgacttggcgatgtgggctcttttttggttccatgtgaactttaaagtagttttttccaattttgtgaagaaagtcatcagtatcttgatggggatggcattgaatctataaattaccctgggcagtatggccattttcacgatattgattcttcctacccatgagcatggaatgttcttccatttgtttgtatcctcttttatttcattgagcagtggtttgtagttctccttgaagaggtccttcacgtcccttgtaagttgcattcctaggtattttattctctttgaagcaattatgaatgggagttcacttatgatttggctctgtgtttgtctgttattggtgtataagaatgcttgtgatttttgtacattgattttgtatcctgagactttgctgaagttgcttatcagcttaaggagattttgggctgagacaatggggttttctagatatacaatcatgtcgtctgcaaacagggacaatttgacttcctgttttcctaactgaataccctttatttccttctcctgcctaattgccctggccagaacttccaacactatgttgaataggagtggtgagagagggcatccctgtcttgtgccagttttcaaagggaatgtttccagtttttgcccattcagtatgatattggctgtgggtttgtcatagatagctcttagtattttgagatatgtcccatcaatacctaatttattgagagtttttagcatgaagggttgttgaattttgtcaaaggccttttctgcatctattgagataatcatgtggtttttgtctttggttctgtttatatgctggattacatttattgatttgtgtatattgaaccagccttgcatcccagggatgaagcccacttgatcatggtggataagctttttgatgtgctgctggattcggtttgccagtattttattgaggattttcgcatcaatgttcatcaaggatattggtctaaaattctcttttttggttgtgtctctgcccggctttggtatcaggatgatgctggcctcataaaacgagttagggaggattccctctttttctattgattggaatagtttcagaaggaatggtaccagttcctccttgtacctctggtagaattcggctgtgaatccatctggtcctggaatctttttggttggtaagctattgattattgccacagtttcagctcctgttattggtctattcagagattcaacttcttcctggtttagtcttgggagagtgtatgtgtcgaggaatttatccatttcttctagattttctagtttatttgcatagaggtgtttgtagtattctctcatggtagtttgtatttctgtgggatcggtggtgatatcccctttatcattttttattgtgtctatttgattcttctctctttttttctttattagtcttgctagtggtctatcaattttgttgatcctttcaaaaaaccagctcctggattcactaattttttgaagggtttttttggtctctatttccttcagttctgatctgattttagttatttcttgccttctgctagcttttgaatgtgtttgctcttgcttttctagttcttttaattgtgatgttagggtgtccattttggatctttcctgctttctcttgtgggcatttagtgctataaatttccctctacacactgctttgaatgtgtcccagagattctggtatattgtgtctttgttctcattggtttcaaagaacatctttatttctgccttcatttcattatgtacccagtagtcattcaggagcaggttgttcagtttccatgtagttgagcagttttgagtgggtttcttaatcctgagttctagtttgattgcactgtggtctgagagacagtttgttataatttctgttcttttacatttgctgaggagagctttacttccaactatgtggtcaattttggaataggtgttgtgtggtgctgaaaaaaatgtacattctgttgatttggggtggagagttctgtagatgtctattaggtctgcttggtgtagagctgagttcaattcctgggtatccttgttaactttctgtctcattgatctgtctaatgttgacagtggggtgttaaagtctcccattattattgtgtgggagtctaagtctttttgtaggtcactcaggacttgctttatgaatctgggtgctcctgtattgggggcatatatatttaggatagttagctcttcttgttgaattgatccctttaccattatgtaatggccttctttgtctctttcgatctttgttggtttaaagtctgttttatcagagactaggattacaacccctgcctttttttgttttccatttgcttggtagatcttcctccatccttttattttgagcctatgtgtgtctctgcacgtgagatgggtttcctgaatacagcacactgatgggtcttgactctttatccaatttgccagtctgtgtcttttaattggagcatttagtccatttacatttaaagttaatattgttatatgtgaatttgatcctgtcattatgatgttagctggttattttgctcgttagttgatgcagtttcttcctagtcttgatggtctttacattttggcatgattttgcaggggctggttccagttgttcctttccacgtttagtgcttccttcagggacttttttagggcaggcctggtggtgacaaaatctctcagcatttgcttgcttgtaaagtattttatttctccttcacttatgaagtttagtttggctggatatgaaattctgggttgaaaattcttttctttaagaatgttgaatattggcccccactctcttctggcttgtagagtttctgctgagagatccgctgttagtctgatgggcttccctttgtgagtaacccgacctttctctctggctgcccttaacattttttccttcatttcaactttggtcaatctgacaattatgtgtcttggagttgctcttcttgaggaatatctttgtggcattctctgcatttcctgaatctgaatgttggcctgccttgctagattggggaagttctcctggataatatcctgcagagtgttttccaacttggttccattctccctgtcactttcaggtacactgatcagatgcagatttggtcttttcacatagtcccatatttcttggaggctttgttcatttctttttattcttttttctctaaacttcccttctcacttcatttcattcatttcatcttccatcactgctaccctttcttccagttgattgcatcggctcctgaggcttctgcattcttcacgtagttcttgagccttggctttcaactccatcagctcctttaagcacttctctgtattggttattctagttatacattcgtctaaatttttttcaaagttttcaacttctttgcctttggtttgaatttcctcctgtagctcggagtagtttgatcgtctgaagacttcttctctcaactcgtcaaagtcattctccgtccagctttgttccgttgctggtgacgaactgcattcctttggaggagaggcgctctgctttttagagtttcagtttttctgctctgttttttccccatctttgtggttttatctacttttggtctttgatgatggtgatgtgcagatgggtttttggtgtggatgtcctttctgtttgttagttttccttctaacagacaggaccctcagctgcaggtctgttggagtttgctcgaggtccactccagaccctgtttgcctgggtatcagcagccgtgtctgcagaaccgcggattttcatgaaccacgaatgctgctgtctgatcgttcctctggaagttttgtctcagataagtacccggccgtgtgaggtgtcagtctgcccctactggggggtgcctcccagttaggctgctcaggggtcaggggtcagggacccacttgaggaggcagtctgcctgttctcagatctccagctgcatgctgggagaaccactgctccttcagagctgtcagacagggacatttaagtctgcagaggttactgctgtctttttgtttgtctgtgccctgcccccagaggtggagcctacagaggcaggcaggcctacttgagctgtggtgggctccacccagttcgagcttcctggctgctttgtttacctaagtgagcctgagcaatgcgggcacccttcccccagcctcgctgctgccttgcagtttaatctcagactgctgtgctagcaatcagcaagactccatgggcataggaccctccgagccaggtgcgggatacaatctcctggtgtgccgtttcctaagcccatcggaaaagcgcagtatttgggtgggagtgacccaattttccaggtgctgtctgtcaccctttccttgaccaggaaagggaactccctgaccccttgcacttcccgagtgaggcaatgccttgccctgcttcagctcgcacacggcgcactgcacccactgtcctgcgcccactgtctggcactccctagtgagatgcacccagtacctcagatggaaatgcagaaatcacccatcttctgtgtcgctcactctgggagctgtagactggagctgttcctatttggccatcttggctcctccctcctaatttttctatttttagtagagacagggtttcaccatgttggtcaggctagtctcgaactcctgacctcgtgattcacctgcctcggcctcccaaagtgctgggattacaggcatgagccaccgtgcccagcccctaaactcttaaatagttttagtctgtaagagagaatactcctgacctaaattggccagaagcccctctcaggtttattcccaaaataaacctgtctttgactgttgagctgcttttcctgtttctttcttcaactcttacactcaacatatagagaacatcaagagtatcaataaagagatagaaattacgaaaaggaactgaatagaacttgaaccatatccctgtattttccctgtccaactccccctaagcaaccactaatctactttccatctgtatagatttatctatttttgacatttcatagaaatggaattacatatagttggtcttttgtgagtagcgtctttcccttagcacaaggttttcattcatgtagacacatccttcccacctctgtggctgaataatacacaatgtatgaatatatcacattaaaaacactcatttataaattgatgggcatttgggttgttctggtccattttttgctggtccaagcttcaccttcagatcagttacctgtcttttttttttttttttttttttttgagacaggatcttgctccacagaacaaatcacagctcaatgcagccttgacttcctgggctcaagcaatctcctgcctcagctttttgagtagctgaaactacaggcacatgccaccatgcccagctaatttttttttggtagagatggggtcttactatgttgcccaggcttgtcttgaactcctgatctcaagtgatcctcctgccttggcctcccaaagcactggccttaaggtgtgagctacagttcccatcctattattaaatattttcaaacagggagataatttgaaataattttacaagtgagcatccacttatagactgaattgtccccatcccctcaccccccaaattaatatgctggagccctaaccccagtacctcagaatgggactctatgtgtaagatcaggcttttttttttttttttttttttttttttttttttttgagatggagtctcactctgtcaccaggctggagtgcagtggtgcgatcttagctcactgcaacctccgcctcccaggttcaagcgatctcctgccttagcctctgagtagctgtgactacaggaacgtgccaccatccccaggtaatttttgtatttttagtacagacagggtttcaccatgttggccaggatggtctcaatctcttgacctcatgatccgcccacgttggcctcccaaagtgctgggattacaggcatgaaccaccgtacccggccaagatcaggcttttaaagaggcaattaagtaagttaaaatgaggcttttagggtgtgccctaatccagtttggctggtgtttttataaggaaattaggacataatagaccaagaagcattgtggtgcacagacagaaggggcagcaagggggtagccatctgcaagccatgcagagacctcaggagaaaccaaccttgccagccccttgatcttggacttccagcctccaggactgtgggaaaataaatttctactttttatttatttattttctttgaaatggagtctcactctgttgcccaggctggagtgcaatggtgcgatcttggcttaccgcaacttctgcctcccaggttcaagtgattctcttgcctcagactcccaagtaggtgggactacaggcatgcaccaccatgcccacacgatttttgtatttttagtaaagacggggttttgctatgttggccacgctggtctagaactcctgacctcaaatgatccaccaccctcggcctcccaaagtgctggattacaggtgtgagccactgggcctggcccaaatttctacttttcaccagcaagtctgtggtattttatagtagccctaccaaactaatataatctaccatctagattccatcagtgatactttattatacttgcctgaccacattgatctctgtatcattcatcaacccatctttatttttattttttttttgcattttgaagtagtttgcagacagcaatagatttctcccctaaacatttttaacatacatatcattaattagagttcaaaatttggggctggaagatctctttccaaggtggctcatcttctgcctagcaatgtggtgctggaaagttggtcctttgccacggcgctgcttgagtgtcctcatggcatggtggatggctttctccagggagggagcaattgaagaaaccgaggaagcttcagtgtgtcttatgacctggcctgagatgccacacatggtcacttcagcagcagcactgtattgattatatgggtcatctgattaaatattggggtgtgtgtggggtgctacacaggacaggaatctcaggtggcaaggatccttggtgagcatcttgaaggctagcgaacacatccacctttcctccagaccacctcatcagcccagaaatccccaccccctgttatcttttttttctgctgtagagcctggtttcattgtagctgtctggggcctctggcatttttatggctgtgtttgggataagttgcaaggtttcctttcccctttctcccctctctgttcttctcagcctcacccccagcttcacccttccttttcctctcagggcctttctgagcagttgatgctctgagggtcagctgggaatgcagcctataagagcggtctgctgggtgcagaaaatgttgggggaaggtttgcttcctgggctcctgtcacctcctgtattatgggagcttgggggcatatgctggcatgttgggactactgttgtcttccatgttctaacattccctgggaaaggagacacttggtttgatggggctctacgtatctgctatcaggtggggacagacatctgcattgcaagagcaagctgaagagttgcctactagggctcagctggtttcttgtgtttggaataaagagggctcactgaaggggcagtcatcttatgttagggaagacttgagggactcacactgtgggctctcctcatttatgttgagagtgttgcttcctgatgcttctgtcaactcttattttgtaataatcgaatgagaggtagaacctggcgggttgcctgttgagattctcatgattgtattgggggaaggctgtggtatccttgctggggatatttgtgtctgctcttggggagacaagggaggcaagctagggtttgtgttgagtgagagtgttgtggaatttggagctttctttagtatgtaggggattggaaattgcctttttgggtttccttcatctaatgttagaggaatataggggggtcacttgaagttctcatctgatggaatcctcattgtgttgaggggtgtaactaagaggctggaggtacgagctcctgttttttagggcctggaggatcactacctttgactcccattttttaaatattggggagtcagggaagtgtacctggatggaggtcccattgtcttagtttgggaagaagatgggttgttattctgtgggggtccacttatctctgtccagtgggtttggaagggtctcttttaacctattttatctagtgttgagggggttactagagtcactttctgggtcttccttattattggtatagatgaggtaggtcactgggcttgggatcctcattctttagtgctgaggggcagctgaggaagtcacttgtgggattgctgtcatttcaagtatcagacataactggaggtgcttattgaaatttccatcagttctagttttgggaggatggatgtcttgctttctcagtatcttttgtgtttggggatgacacctgctaactgaggtcttgttgcctctagttttggaggggcctgatgaccccttactaggacttctatcatctctattgttggatgcagactatacgcaccacttgttgggccttccataatcactagtcttgtgtgtttgtgtgtgttgggggagaaatctcctgcagtgctttccaccacctctagtttggggagatcaatgcaatgtgtttttaaaagcattttattttggaaagtttagatatacataaaagttgtaaaactatacagggttgttttatacagtcagtactgatttatatttacttgcatcttatgtttcctgttgatcttaattcctggaattatgtatgtctctatggaatcattttcctgaagcctgaagaaatctcttcagtgtttctgaaaatacggttatgctgttaattctctcagcttaaaaaaatccctcccaggccgggcgtggtggctcacgcctgtaatcccagcactttgggagaccgaggtgggcaaatcatgtgaggtcaaaggatcgagaccatcctggccaacatggtgaaaccctgtctccactaaaaatacaaaaattagctgggcgtggtagcacacacctgtagtcccagctactcaggaggctgaggcaggagaatcacttgaacccaggaggaggaggttgcagtgagccgagatcatgccactgcactccagcatggcgacagagtgagactccatctcaaaaaaaaaaaaaaaaatattccctcccattggaaaacattgttgccttcagttttgaagaatattttcttaggttacagaacttttgattgacaatttccccctcctccaacccatttaaccctttatatgtcagatgtcattcattgtcttcttgcttccatagtttcttttgaaaagtcatcattagtcttactgatgctgctttgaaagcaatgtgtccttcttctttggttgtttggtagatttgcagtttgtctctcattttctatggtttgtccatgtttcctccatttcccttaacatattattcttggttattttaaagtctttgtctgctaactccaatacccaaattgtctctggatctgctattgatttatatattcataaatggggatattttcctgtctcaatggatgaaggagagtgaggtctgaccctggctatttcctgcaggaggacctggggctggatgctatcgctgactgacctctctcagctcctggaatgcagccctctcctctcgtctccagattcagttgctccctcccttcgtcccttcaggctgtgaggtgttagagctctgccctgctaagctgctgggtgctttacaactttttgtggtttccctggatcctgtccacaggactgagtagaccctttatgaaaactctacttgaattgtcctagtctgtgggtgtcaacctgagttcctgctgggaccctgactgatgtgccaactcactgaaataaggaaaagtcctaacaatgtctcagaaaacccaacaagatcaggatctaccatgtctctgaccacatcatcttttactgctccctcatcacccctttgttccactccagctgtattggcctccttgttgtgggcctttgcatgccaacactactcttgcaagacaaattcatatgactcactgtcccaacttgttgagatctccgctcaaatgctccttaccaagaggctttcttttcctagttatataaaattattattcccaaccccccttaactctcctaaaatgcttttttttcctataactctataataccatattttcttgatttttctataatctgttcctcctccattaggtgaagtatttcaatggcaaaactttgcctggcacacagaacatactccgttaatagggtagtggttaagtgcatggactgtctgggttcagatcttggctctaccatttaccagtcagtgaatgcaggcaagtaacttaagtgtatcataccagttttctcatctgtaaactggggataataacattacatacttaagtttataatgcatactgagttaatacttatatgtcatttagaagggggcctgatctatgggaagtgcaatataaatgtctgaccatcaggagttcgagactagcctggccaacatggtgaaaccccatctctactaaaaatataaaaaaattacctgggcgtggtggcaggtgcctgtaatcccagctactcaggaggctgaggcaggagaattgctggaacctgggaggccaaggttgcagtgagccgagatcgcaccattgcactccacccttgatgacaagagtgaaactccatctaaaataaataaataaataaataaatgtttgaccatttattattaatgcattacaatactttgctatgtaaaaatatcatctccacataaaaaggaatacagaatacctaatcctgtatgcatctagttacataatgtcaaaatatataaaaatgacaaaattacagtgttaatacataaacataatggaagagtttaccacacctctatcactaaataaggttagaaaaagaaatctgaacatacgtactgtacttggaaatacaattaagttgcattaatgttcatataccctatatccaaatattagagaatatacattgttttcaaagaaacaacatgggtaaaacttgaccaatttataggtttaccagttagattctgcatcctgctggaagttaacagaacaccacctcaaaaacaaacaacagatcatgttggcttcaatcagttaggggtttctttttttaaaaatatttatttgtttattttgagatggagtctcgctctgttgccaggctggagtgcactggcgccatcttggctcactgcaacctctacctcccaggttcaggcaattctcctgtctcagtttcccgagtagctgggaatacaggtgtgcaccaccacacccagctaatctttatacttttagtagagatagggtttcaccacgttggccaggatggtctcaatctgttgacctcatgatccacccacctcagcctctcaaaagtgctgggattaaaggcgtgagccaccacacccagcctaggggtttcttttagtcacataagaagtataagaataaggagtccagagcagatgcagccaatcggaggctcctggagagcccaaagcattgtgatttttggctgcactttggtttctgtcattgtggtcaaaaagaagctcttcaaactctagaccttgaggccactttccaagagacagaatgggtgaggtgaatggaaaatatgtgaggagaacaagccaggagatgttccacacagtgacttcgacttacttctcattgccaggggagtgcgaaaaaacccgcctgggcttcaggaaaaactataagattgagaactttcgatattgttcacagacaacttgaacaacatgtttgtttctttaaacgaataaactgaagagaacggacactgggaaagaaaccaacagtatttggcataccaagatagagagaaaataatcagtatcataaagctcatgtactctgccaaaaataccactacattagaaaaatgtgtttataaatactaatttccattatgataaactgaatcactcagaaggtatttggaaataactttttgaatatgcaatgtgtggatgtctttaacaagcaaattaattataataaatacattgcattaaaattatgaaatatgttaatgtttattttagggaacagctatacacaaatgtttatattaaaagaaaaaaagactaaaaaaattaatgagccagcagtccaatctacagatgagacactgataaaggatatcccacactcaaaacagtgattatactttttgttcccagtgaaaattgtggccactcagtgaagagttcaggctgaggcatcctaacactgattacattcctaggggtttctccatataagttctctcatatacaagaaagagaagaatcactgaaaaattttccaatattaatatactcataggttttgcatccagggagaagttccatattttccctaacacagaggcatcactgaaggctttctcttcttctttatatttcaagtttctctgtagtgtgaatgctcacaagtttcctaacaaatgtagaaaaacagaaagctctccaatattgatgatgttcaatggggcattctctccagaattaattctcaagtcccttaaaaaccgatagaacattcaaggctttcccatagtcactgcagaataccacactatagtttgctcagtaatgtgaacacttttgctgtagggtattccgcatttctgagtgttgttccattgtgtgatttccagtgcgtcttaagggatgactgtcactgaagccttctgagaccttcacaggttttctcccttagtgtgagctgtcacatgaatccctgctgatagcactgaaggctttctacagctgttccattcttcaggattctctcagtacataatcttctgggcccatgaaggtgagaattcgagctgagagctttaccatacagattgtcctcaaaaggtttctcttcagagtgaattaataggagttactgaatgctatttcatattgattagagtagaaggatgatgtgctgagggcttttcttcattaattccatggcaaatttcccagatgcttctgagttatctgtttcctggtattcataccttctgcagtctctcacattgtatcaggattggtgtgttgtgagaccaacacaataggaaataagtgaaagcttagcagtcctcctgaggataggtcataaaagccattttggcctctgtattggtcctctcttggatcactaaccttggcgagaacttattgccaaattgtcaaggagctgggccttgtaaagaggcctacatggtaatgactgaaggtcccctgacaacaaccaacatcaactttccaggcatgtgaataagtcatcttggaagtggactgttcatcagtaaagatgttagatgactatagctttggctgacatcttgattgtaagtaaaggcatgagagatcctgcagtgtaactacagagataagctgttcttgaattcctgatctgtagaaattgttagagaataaacatttcgtgtttgaagccacaaaatttgcggggatcatttgttatgctgcaacaaataacttatatatccagtgtgagctctctcaaactatcttagggatgaaagatcaatgagtgctttcctccagaagttcctgcagtaattcatatccatctattatgtattctcttgtgcacagaaagataggagttacttgtgaaggatttcccacaatgattacattcatagggtttttctccagtgtgagttcttaagtgtttcttcacagctgagagattattaaaggcttttccacagtcactgcactcgtagggtttctctccggtatgtattctcttgtgcacagtaagagaaaagctactgctgaaggatttcccacactcgttacattcatagggtttttctccagtatgagttcttacgtgctgtgtcagataggagctcttcctgaaggttttcccacaatcgtgacattcataaggtttctcccctgtatgaatgctattgtgcccagtgagagaggaccttgtgctgaaagcttttccacactgattacattcatggtgattctcccccgtgtgaatcctcttgtggcttttgaggttacaactggtgcggaaaacgtgaaaacactggttacattcatagggtttttctccagtgtgaattctcaaatgcagtctaagggatgagggatcactaaatgctttcccacagtgattgcattcatagggtttctccccattatggattctcttatgaatagtaaggtaagatctgctactgaaggacttcccacattgactacagtcatagggtttttctccagtatgaattctcttgtgctgagttaggttagatttcgtgctgaagactttaaaacactgattacattcattgagtttcactccacgatgacttctttcctgtggattaagagatgaatgataactataatttataatatttgaaatacttaatgttctcctaggaatcttctctcccaggaattctgttacattattataattgatattttggctactttcagtggttgtatgtgatttctgcccagttttagctctaagaaagttaaaaaacatagatgctttgccacaagtccttatcagatgcacaaaacattttctgataacgtgtggatgaagttttgttccaacagtcaatatctgagccacagataggaaatatttacttgtgggaactctccgtgaagaaataagtttggagctaactcacacttctctaaatatttataattttcacagtgtctctccaggaacacagcattctcaattataaatgacactttcctttaatgcctctcctggttattttgtgccctttctaaacttaaggcattctcctactgtagaaaaccagaaatcacccatgttagtcttaccgtttttacacctttagactgttcttttctgaaaacattcttcttaggagttaaccatttggctttaagtagagtctccaaatctgaaacaaattgaaaagaaatttaggttgatggagaaaagaaatggaaaagtgtacacatgagtaaaggcagattctgagggatcagggtttttgaggatgtttgcaacaaagaggatttggttatgaaaattttaggtattaattttaaaaaaggattctagacaaattgagattgatcacagattgacaagaggagtgatcaggaatgcaaagtggaaaggaacttgactgaaattttcaaaagagttgcatctttgtttcttccctgagcccaaagtgaagtatgagatgatgacaagggagttagagagaaaagaaaggacatgaggaagctcacaccaaatgttctcgtgcatgtttgtcaggaacagggtattttacaaagttccctgattgacatgaactaatgtaatactcccaacccccaagtcactggccagagctattcctcacaagggctcatatccacctggtgctcacctggacaggtgcttggtagaattcctctttcctctgtcaccaccttcttgtcttgttccaactgggatatcagactgggtttattaacacgacaccctatttatggaaacaatacacatgatataggtaacagtgctggggacaaccaagtccatgaaagaaagccaacatttatgaagatggaaaagtgtgactttaggagcagtgaaataaattatgccttaattcttttcttttttttatttattttgagatggagtcttgctctgtcgcccgggttgaagtgcagtggcatgatctcggctcactgcaacctctgccttccaggttcaagcgattctcctgcctcagcctcccaagtagttgggactacaggtgcacacaaccacgcccggctaatttttgtatttttagtagagacggggtttcaccatattggccaggcaggtcttgatctcttgatctcctggcctcgtgatccacccaccttggcctcccaaagtgctgggattacaggcatgagccaccacgccctgccaattataccttaattctagtgcatatggtaactctcactgaacaaaaatgcaacaagcatattcaactagatattcagggtgatagggcataaacagccccagaaggccatgcctgagttcaaatgcacacttcagaggccccaaaacttttaaccatgaagaatataaagtcaggacaagaaatagatcttcagttcataaggcaggaattagagactgcccatgagggtgggaccatatggtcccattcatcactgtactcccaagtcactgcacagacctaggaacacagaggtgctcaagaaaacttgaaagaagtgatgacagtgacagtggtggaggacggaattccaaacgttcatccctccacaaaaacagtgagtaaactggcaaaagcggtccgaatcaactttatcggaattcttgaaatgtatcaaaagtccacagcaatcaggagaatgccttctcagaaaacccagctgaatctgggtaagagagctttatgatactttaaatggacctctttcccctgctttttctacaaccttgaagacaacagcctgcattcctagtacttgcagggagcagaacagaccttactctgtggttgctcttcctgacctgtctggtggttccctgaaggactggctcaaagggttgtctttatttatctaactccaaattctttcaggactgagctggttacctggaacacacgtgatcgacagatgtaaaggtaaatgtattagtcagtactgcttgaggcaagagaaaacagtagaagcaaacaaaagactaaccgaaaagcctgaaaggaaaaatggggaaaaagatgtttggggagtaggactttgaaaatcttcctcatattcttaagaacctgtaattccaagcacatactcagggctgggagcatgcccagaaaatacctgagaaggcacaaaaccctcatcttttggtgaccttcaggctctgcacaagccagaaatgaaggtcaaggcacagttaaatgcctacctaagtattaaaggcatgtccctatgtacacacagagcccacgtaaagagactagaagttttttccttttttgttccaggccttcaaatcactatatgaccattacgctatcagaaaagagacttcggtggccacacatgacaaatacagacattacaaagttagttctgaaatagaactattgtatattctaacaggagtttacaatatatgatattctacaactttagaacacacaatagttctatttcacaactaactttagaactgttgtatgttctatagatacaataccaactacaacaagtaaaacaaactctggagatggggaaaagtctgattcccaaattgctatattataatattccaaataccctagtttcaacaaaataattatgagggaggcaaggaaacaaacgttgggcccattacaagaaaaatgaagctggtagaaattgtcccttcagaagttcaaacactggacttaactagacaagtaaaataagtcaactatttaaaatctgctaaaagatgtaaaagaaatatgtataaagaactaaaggaaaccatgaatacaaattttcatcaaatgaaaaacagcaaaataggtacaactatggcatatcaaaaaaatacaaaaaatggaaaacattaagagacagaaactttaggaaggcaaataaaaaaatttgagttgaaaagtacaatagctgaaatgaaacattcagaacatatctgagcaggcagaagacaaaattggtgaccatgaagataggacaatcgatattatccagtctgaggagcagaaaaaagagagatgccaggtgcaatggctcatgtataatcccagcattttgggaggctgaggcaggaggactgcttgcaaccaggagttcaagaccagcctgggaaacatggtgagatcctgactctacaaaaaattaaaaaaattagctgggcatggtgatgcacgtctctagccatgcctccctatttgggaggctgaggtgggaggatcacttgagcccaggaggtcaaggctgcagtaagccacaatcactctgctgcactccggcctaggtgacagagtgagtgagaacctgtctcaaagataaagagagagagagagagagagagaatgtgagttttaaaaaagatgaacagagcctgagacctttgggataccatcgaacctaccaacatatataggatgtggagaaccagagagatgtaaagagagaaaagggtgagaaggttgaagaaataatggctaaaaacttcccaaaatttgatgaaaggcacaaatgtacaaatccaagaagctcaacaaactcaagtagaataaatttgaaaaaatagagattcatactgaaacacacacacacacacacacacattttttgagccagggttttattctgtcacccacgctggagtgcagtggtgtgatcatggctcactgcagccttaatctcctggggtcaagcaatccttccacctcagccttccaagaagctgggaccataggtgtgcaccagcacgtctgactaattttttaattttttgtagagacagggtccaagttgcccaggctggtctcatactcctgacctcaaggggtccttctgcctcagcctcccaaagtgttgggattataggcgtgaaccattgcagccggcatcaaacacatattaatcaaactgttgaaagacaaaggcagcatcctaaaaacagcaagacggagatgacttatgacgtaaacaggatcctcggtaagattacagtcaatttctcaatagaaaccatggaaaccaccaagcgctggagtggtacattcaaagagctgagaaaaaatggcaaccaagaattctatatctggcaaaactccccttcaaaaataaagaaatgaagaccttcccataaacaaagactgagtgtttgtcactattacatctaccctacaaaaaatgatcaagggtgacttcaggacaaaatgaaaagataatggagagtaacttgaatccacagaaggaagtgaagaacacaggtaaaggtaaatacagaggtgaatataaaagtcactgacaatgtgtttttggtttataacttctcttttattactacataatttaaagacaaaagcataaatgattacacatctacattaatgggcacacaatgcatacagatgcaatttgtgacaaaattactaaacagaacagctacagtgaaacaaagtttttatatactattgaaactaagttgctattaaactagattgttataaattaaaatgcttattaaaattctcagggcaaccactaagaaaataactaaaaagattaaaaagaaatgagaagggaatcaaaatggtccactagaaaatatctaacacaaaacaacaatgaaagaacttaggaacaaaaatgatatgacacgtagaaaaaagtaaatagttatagagcaaatagtaaataggcagaagtagctccttccttatcagtaattacatcattacaaggtggattttggcagaatggatttaaaaaataacccaattacagatggtccccagcttaccatggtatgattttttaactttatgatggtacaaagatcatacgcattcagtagaaagcacacttcaagtaccctacaaccattctatttttcactttcagtaccatattaaatatataatttataattgttgagatattcaatactttatttaaaatacactgctatgttagcccactgcccaactgtaggctaatgtaagtgttctgagcatgtttaggctaggctaacttatgatgttcagtgggttaggtgaattaaatgcatttttgacttttttttttttcattgttttgcatttttgacttatggtatttttaacttacaatggctttattgggacatagccccatcaaagttgcggagcatgtgtacatactgtctataagacacttgctttatattcaaagacacaaatatggccaatagtgaaagaatggaaaaagatatttcatacaataaaaattgttataaaacagagaaagacattatagttgtataaagcatcaatttatggagaaaatgtaacgattataaacatatatgtgcctaataagaactccaaaatgtatgaagtaaaaactggcataattgaaggaagatatagagtgttctataataatcgtttgagacttcaatactccactttcaataatggataaaacaacatattagaagatcaaaaaggaaacagaaggattaaacaataaactaactagacctaacaaatatataaagaacacaccacccaacaagagaatccatattcatctcaaatgcacatggaacattctccaggatagattatatgttaggctataaaaaaagtctgactaaattaaaaaacaatgaactcatacaaagtatcttccttaaccacaatggaatgaaattaaaaatgagtaacagggccaggcgcagtggctcacgcctgaaatcccagcactttgggaggtcgaggtgggtggatcacgaggtcaagagattgagaccatcccggccaacatggtggaaccctatctctactaaaaatacaaaaattagctgggcgtggtggtgcgcacctgtagtccgagctactcgggaggctgacgcaggagaatcacttgagcctgggaggcggaggttgcagtgagccgagatcgcaccactgcactccagcctggtgacagagtgagactctgtctcaaaaaaaataataaagttatgtattggaagccttaatattgttaaggtgacaatactacccaaaattatctacagagataaaacaatcactatcaaaattctgagttttttttcctttcagaaatacacaaactgatctgaaaattcatggcattgcgagggatcttgaacagacaagaagtgaaaaagaagaataaagtagaaagatttacacttactgttatcaaaacttactacaatgtaacaataatcaaggcattgtggtactgacccaaggacagatacatagaccaatggagccaggagcagtggctcatgcctgtaatccctgcactttgggaggcccaggtaggcggatcacttgaggtcaggagttcgagatatacagaccaatggaacagaattgagagtatgtaaataaactccagtgtgtatggccacataattttcaataagggtaccaaggtcatttgatggggaaagaataaaggtggtgagacaactggatatacacacatgcaaaagaatgaagttgaccctttctccacaccataagcaaaattcactcaaaatctatcacacagctgagtggaattgttaacactagaaaattcttggaagaaaacataggggtagatcttcatgaccttgacttgagcaatggtttcttaggtatcacaccaagagcacaagcaaaaaagaaaaactagatacaacagacttcatcacaattaaaattttttttgtcttctgagacggagtctcgttctgtcgcctaggctggaatatagtggatctcggctcactacaacctctgcctcccaggttcaagtgattctcttgcctcagcctcccgagtaggtgggattacaggcacctgccaccacgcctggctaatttttgcatttttagtagagatggggcttcactaagttggccaggctggtcttgaactcctgaccttaagtgatccatccatctcagcctcccaaagtgctgggattacaggcgtgagccactctgcctggtcacaattaaaacttttgtgcatcaaaggacactatcaagaaaatgaaaagacacccaaagaatagagaaatcatttatgtattatattttgaataaggatttggtacccagaatataaaatgaacttttaaaatccgacaacaaaaataaacaacccaagtaaaacatgggcagaggactgggagcggtggctcacacttgtaatgccagcactttgggaggccaaggcaggcggatcatttgaggccaggagtttgagaccagcctggccaacacagcgaaaccctgtctctataaaaaatacaaaacaatttagccaggcatggtggcacatgcctgtaattccagctacttgagaggctgaggtatgagaatcacttgaacccggaaggcagaggttgcagtgagccgagatcgtgctgcgccactgcactccagcctgggcgacagagggagactgtgtcaaaacaagcaaacaaacaaataacaacaataacaaaaatgggcaaaggacttgaatagacatttttccaaagaaaaatactcaacaagtacatgaaaagatgctccatgtcatttgtcattagaaaaatgcaaatcaaaacaagaacgagatagcacttcatacctactggtatgagtataatcaaaaaggcaagtgctgggaagatgcagagaagctggaaccctcctgcattggcgggaacgtgcaatggtgcagctgctgtggaaaagtctggcagttcctcaagaagctaaacacagacctagccttccactcctagtatatgcccaagaaaatggaaagtgggcatttaaacaaaagctcgtacacaaaaattcatagtattatagcattattcttgatagtcaaagagtggaaacaactcaaatgtttctcaatagaaaaatggattggcaaaatgtggtatgtccatacaatggaatatcattcagtcataaggaatgaagcgctggtacaacatacaacatagctaagtttttttgttttgttttttttgagacacagttgtgctctgttgcccaggctgcagtgcaatggcacaatctcagctcactgcaacctctgcctcctggttcaagcgattctcctgcctcagcctcctgactagctggggataggtgtgtgccaccacgtccggctaatttgtatttttagtggagatggggtttcaccatgttggtcaggctggtctcgaactcctgccctcgtgatccgcccgcctcggcctcccaaagtgctgggattacaggtgtgagccaccacacctggcccatagctaagtttttaaaacactgtgctacatgaaaagtcagacacaaaaggtaatgtattttgtaattacatttatatgatatgttctggataggtaaattcctaaagacagacaccagatgagtggttaccagcagcagtgggtagggaaagtaacgggtattggctgcttcatagggacggggtttccttcagggtgatgaaaatatggtgatattagatagtgttgatggttgcacaataccatgaatgtatgaaaaaccactggactggatatcttagaatggttaaaaatggtgaattttatgttgtatggattttaccacaataaaaaaagtaagcaaagcaggcaagtgttgccactggagtcattaaataaatgcaggaatgacattaggcttacctagtgaggccaggttcctgcagttctccagcatcacatccctgtacagtgtcctttgggcagggtccagcaacgcccactcctcctgggtgaactccacggccacatcctcgaaggttaccaagccctaaagcattgcaaacatcacggcttagccaaggaccacccccaccaacgtgcacaggaagaggggccaggagaacagagccagggctggggaaacctgagcacgagatgttggggggggtggttctgagctcacctcccagggttctgagctcctctcccagggttctgagctcctctcctggggttctgagctcttctccctggcttctgagctcagccctcaatgcttgtctccttaggccattcccaggtccagtgcacagtaccacagagcagctgccttttctcactcagactgggagctcctgtgatcttatttccctcaatctccaggggatcatgggcccgtgacatggcagaaagcagagaaatacttggtaagtgaatgactgatttccgtggcgtttattaattgcttgggtttagaacatcatcacgtctttacttggctttcccttaaaactctcaggagcacatgatgtactcagggaccctggagggagctctgaacctgcagtaaatgttgacacacactgacattttctgggcagccctcaccctccatctgatgcctggaaatcctgggatgcctgaggacctggtttggccatgaggctccaggctgctggaaggtatcaagtccaaccttctggccaaaggaataatgatttgggaaaaggaacatctgactcacccgtagccagcttgtcaggagctcattaaccagctctccgccctgtgtgtgtcctttttgctgagaggctgggaacagggaagacggagctggaggaggagaaatgagtcccatggattcaggcttgtctgacacccacagatctgcccctgattgaccacacccacctcccacacccacacggatgaggcaccacacagtgcccacctacgctccatgcaaacacctacccacagctctcctaagatacccaaacacagccctgtctcaccaaccaaagacaatagggctcaaggtctgactgcacttggggaagggattattcccacttcacagatgaggaaacaagttccaagggcgtcactgtgtttttatcagattcacagaaagaactaaagggagaattcaaaagctccagcacattcaccacacaggtgacatccacagacacccaaatgcctaagtcccaaatcccgagagctgcccgatcagacacggaggacctctgggcccctggggctccactcctgcctcacctgctctgcccaaccccgctcgtgtcccatgctgtgggtcagaacctttcaaggctggactctgagaaatgtcaggaccccacgactcaccagcagtcgagggcaggatgacagccgccatcctgtgactccgacagcaacagggcagccgggaagcaggacgctcctcctttatcccgcagcgctctggaagaaacgggaatgctccaagtctccgtggcctcctccctctcgggctgctggggatgggccctcctcaacccatccttcccatccttcttcaaatgcaagttccggcttccacactgggcctttattttgctgagcaggcaatgaattcagggccacctgatggaaaacttgccttcctctgtccccaacacaacgaccagtacctccctgacccacccgctttgagaacctcggcttcacgcagtctcacggcatgttcttcccatccaagcgcaccacaaacgcattcccggctactccctccttccccggggactccggcgcctccataactcctcccacctccagtcccagctcctggaggatgtcagagacccccagagtctcaggagttcctcagctccagggccctttgttccttctctcatcagccacatgtttccacaggtcccctcagccttggtcatcaccgggcactgtcccaccacccagaacaacgttcagaaactcccctctctctgaacccaacctccctcctcaacttccacggcgttcactccttttttctctcaccgcatgtcctccgaccacacgcaggcctcagtcacctcctcctgcctcggtcacccccctcctgcctcagtcaacccctctcctgcctcggtcacccccatcctgcctcagtcagcccccctcctgcctcggtcacccccctcctgcctcggtcacccccctcctgccttggtcacccccctcctgcctgtgctctgcctcagttaccccctctcctgcccatgttctgcctgttaccccaactcctgcccttggtcaccctgctcctgcctgtgctcggcctcagtcacccccctcctgcctcagtcagcccctctcctacctatgctctgccttggtcaccccctctcctgcctcagccaccccctctcttgatttcatcctcacccagcttggatgtcactgtccctcatttcagctgatttcctcctccctaccccccactgtcatgccagcccagcagaactccagccaggcgtgacttcaatcatccacctgctccaggggacattcgggcagaccaccctgtgcaaaggctgtgacgttgccactctggaataacacggtcaccaacgtgtagagaaccctcagcctgcagggcgatcccacaggtcagcatggcttcccactcgtcaaacctcctctcctctctttaaacttcacacctcctcccctgtcccctctgtggtaactgcttcctaacgagcccttgacgatcccagcctcccggtgctcacaccctgtgtaggcccgacgcacacacggaattagagctgacctgtgtgaccagcagaatatggctgaggagacagcgggggtgggtgcaggggtgactttcaggaccaggtcttggaaggcactacagctgcttccgccttggtctcctggatgttgctctagaggacaccagttgccatggtgggaagacgctcaagtggccctgtggagaggcctatgtggagaggaactgaggcctcccaccgacggccagctctgactcgcaggccatggagtggcccccggtacccgttgagccttcagatgatgcagacccagctgacagccttctgcaagtttccagccagagccttccagccaagctgctcctgaattcctgaaacacaaaaacagtgagagacgatacatggtcattgtttcaagtgactaaggtttgagatcatttgttaggcagcaagagatgacaaatcatctcattttcagcagacaatcccgatcctgcttctcagggtaaagatcatgaggaggaatctactttcctgtgttgctgccagcactgcaacctgtgccccacccttctgcctcctcccatcgcagacaaggagctgcctgccttctccgcagggcttgctgggcagttctggcctggggtccaccctcctgcttttgaggagctgtctgtgctcgaagctctctcctccgccctttcccttctagctctcccgtgctgctagacccttcctcatgcccctcaagcctgatgtggcatcttctgtagtgcgatgagcccatccttggggtacagctttctttccggttactgccccgtctgtatcccccatcccagccacagctcttcactctgtcccctttcctgagtcctcacacggtgcaatctggcttccctactatcatcccaaggacaatacccttgatggaatcgacaatgaccttactcaccagggagacgtggattgcagcaactctggcgctatttcctatctggcaggtcaacagagacacagtggcccacactcttcattctcacacactgctgggggtaacccctagggaaggaaacgtgctgatgtcaagcaaacctgcaaaaaacatttgttctttcctagaacccacttctagaaatctatctcaaaggtacacaaatactgaaagacacgtgtaagatgattcgctgtggcacttcatataatcgcagaggattgaaaacaccacaagtgaccatcagtaggggattgggtgaataaactatgtgatagctttaaggttggtgcaaaagtgattgcggtttttgccattactttcgatggcaaaacctgcaattacttttgcagcaacttaataaataacaaagaaacatgtagccaggaaaaaaaaaccccaaaccaaaaccaaaacaaagaacccctgaaaagatttctaggtattcagagagattatctccaataaatttaagtgaaaaaaaaatcaaggtacaaagcaatgtcatgtgtcctttttataagacgagaaagcctcctttctccagatttatagaataaaacgtaactccataaagccagcttctggaggtttccatgtgtgacctccatgacatgaacccaaaagataaaaggagtgaagggtgtgaatgggcagggatgggggcactggacattcagggtgagttcgggttccgtcaaaaaatcaagttggagggagtctttggctcttgggcctctgtggtagacagatgattaacttcctgctctcccaagaaaggggtctgtgttctaatccccagaacctctggatctactcccttacatggcaaaagggattctgcagctgtgaggaaggcaaggatcctgacatgggggatgatgctgggtgggcccactgtgattacaggggtccttataaaagggaaacaggagggtcagttcaaagaaggatgggatgagatgagagaagaagggagcgtgtgtgtagcagggaggagataacatacagagagactggaagatgctgccctgctggtgttgatgatggaggaacaagccacagtcagggaaggctggtggcctctacaagatgaaaaacgcaggaaatgggttctcccctagagcctctagagcagtggtccccaacctttctggtaccagggactggtttcgtggaagacaatttttccatggagcacggggcggcagtggggctgggcagggaatggtttcaggatgatgttttataagcacattacatttattctgcactttatttctattatattacacagtaatatataatgaaataattatacgactcaccataatatagagtcagtgggagccctgagcttgttttcctgcaactagatggtcccatctgggggtgatgggagacagcaacagatcatcaggaattagattctcctaaggagtgtgcaatccagatccctcacatgcaaagttcacaatagggtttgggctcctatgagaatcgaatgctgccactgatcggccaggaggtggagctcaggtggtaatgcgagcaatgaggagtggctgtaaatacagatgaagcttcgctcacctgccactcacatcttgctgtgcagccctgtttataagcactggtccgtggcccaggggctggggactcctgctctagagggaatgcaggccttccagcttattgaggatttctgacctccagcaaggcaagaggataaatgtgtgttgttttaagtccctgaatttgtggtagtttgttatagcatcaataggaaactaacatgcctttcacatcacaccttccctttgggtgagttcagcagacccaggcaactgctgcagaacttccctaccctctacagggggaagtatctcctttttccccgtaacagacctaatgtgcaggtaggcacacagtagttccagtcactgagctggggagtgagggggggttggcctccagccagctcactgggcctccaagaaaaaaacaagtagagaaggtacctgggacattttcaggccccaagtccctattcaaggctgtctggaagcagaaatttcccactaggacaggaggggtctcttcagtttacagatcctgtgacacctgccctgccctggatacagtgctggaggatggtcacagcagatgggccactctatgtcagctgcccaacacaacttctggtgatgatggaaatgttctataattctgctctaatacttgaaatgtgactagtatggctgagaaaataaattttattttttttgggagcaatcatctgattcctaaactacctccaaacaccccctcttttgcctcttaaatgtcttccttctgaatcctgaagtccttgttatctgcatgcttacactacatgcaaattgcatcaccctctggcccacaactctttagtgtcttcccactggcctgagaacagagtctgaagtgaggcctagtatggttctgcctccctcttgatcttggtcttggtcacacttctttccctattcttttttttttttttttttttttttgaggagtctcactcttacacccaggctgaatgcagtggtgcaatctctgctcactgcaacctcagcctcccaggttcaagcaattctcttgtctcagcctcccgagcagctgggactacaggtgtgcaccaccacacccagctaattttcgtatttttagtagagacggggtttcaccatgttggccaggctggtcttgaacttctgacatcaggtgatcagcccaccttggtctcctaaagtgctgggattacaggtgtgagccactgcgcccagcttctttccctgttcttgtctcggcttcagccatccctgtgttcccagtgcagggagcgtggcagcctctctcctgctgcagggcctttccttacacagcttcttcgacggcagtgctctcttggacataaccctgtcccctcactctagtcgagccctatgactagctacatctgaccccaacttggagatggagcagcaattccctttttcaggggcctgtgaaccccaagtgggaaaataaaggaaaatcctgaagttcctttaagggaaattccgagcatccagctagccccaaaagtaaatatggaacttgttaaacaggaaggtaatagtaacctaaaacaacagccaaagaagttaaggctccagagatgttcgctttccccatggaaactaaagataacatcttaacatgcgtccctgagttgcctttcagaggctgggactcccactgaggaccccaccaaatggagctgctggctcagagaccccagataagcgggacatgaaggctgagcttcagcgttctttgtgctaagtttcttcttgaggggcttggagaaagtcacttctcccagccagttaacattttcctactgactctaaatttttaaacaaagcttcttttctttaaccaattacaaatcagaaaaatctttgaatctacctatgacaagctcctgcttcaagacatccttgcccttttaagtctaaaccagtgtgtaacctccatgtattgctttatgattttgcctgtagcttctgcttttctgtaacttaccattgccttcagaaatccttgcctagccgggcacggtggctcatgtctgtaatcccagcactttgggaggcctaggcaggcggatcacctgaggtcaggagtttgaggccaacctggctaacatggtgaaactctgtctctactcaaaatacaaaaaatttgccaggtgtggtggtatgtgcctgtaatcctagggactggggaggctgaggcaggaaaatcacttgaacctgggaggcagacgttgcagtgagctgagatcgtgccattgcactccagcctgggtgaccaagtgagattctgtctcattaaaaaaaaaaaaaaggccgggtgtggtggctcatgcctgtatcatctcagcactttgggaggctgaggcgggtggatcacgaagtcaggagattaagaccagccgggccaacatggtgaaaccccgtctctactgaaaatacaaaaattaaccgggcatggtggtaggcgcctgtaatcccagctactcaggaggctgcggcagaactgcttgaacccgggaggccgggggttgcagtgagctgagattgcaacacagtactccagcctgggtaacagagtgagactccatctcaaaaaaaaaaaaattccttgcctaaaagccactggggaggccaggatttgaacatttaatgtctggtcctccttgcttagtgctgtgcaataaaagcctttctatctatcgtagcaaccctcaatatagacatctggtttcactgcaccaccaggtgagcagaccccagtttggttctgtaacaacttaagctctcaagctaaatatccttcccaagaaagcttccctgttccctctgatcaagttcactagtgccaagctcccacatcactcctgtcattcatggtttaaaatttatcttccctgttagaaggtaaactttatgtaggacaggggccatttcaggtcctccagggtccctgtgcatctgacctaggacctgactcatggaggcgacctggtttgccaaggattgtcccggtttgaacactggatgccctgtgccctagcaaaccccttggtcctgaaaaaatgaggatggttggtcaccattaactgtgcactcaaataatatctattgcatgataagtaaacattccttcaagaatgctgtaggaaagctagaatggaaaaggtgaacacacacacaattagtagaaaccccacaatttaatactagattacttaacatgattctctgcaatatgaatcaccatactgttatttcagagaagttttaagaaacaaagttaattcctattaggaggtgatatcgttggctctgtgtccccccacccaaatctcatctcgagttgtaataatccctatgtgtcagaggagggtcctggtaggaggtgactgaatcatgggggcggacttcccccttgctgttctcctgatagtaagttcccacaagatctgatggtttagaagtttggcgtttatgtcttctctctctctcctgctgccatgtaagacgtgccttgctttccctttgctttctgccatgatcgtaagtttcctgaggcctcccccgccatgcagaactgagtcaattaaacttctttcctttgtaagtcactcagtctcagggagttatttatagcagtgtgaaaactctcaggtagttctttatagcagtgtgaaaaaggactaatacaggaggcaaggtgcagaggacaatctttttggaaaccagttccctacccttcaatctataagttgttgcttaatattcttccaaatgttttcaaatctcattaggaaaaaaaaaatcccattactcaaaacacatctggtcgccggtcaatttaattttaaatttgttactaataaatcatcctttttacaaatgcccttatattttgaagtttggtggagggccaatatgcctttagaaatcaaatcaacagctgggtgcggtggctcttgcctgtaatcccagcactttgggaggctgaggtgggcggaccacttgaggtcaggagttaaagaccagcctggccaacatggcaaaaacctgtctctactaaaaatacaaacaaaattagctgggcgtggtggcacttgcctgtagtcccagctactcaggaaactgaggcaggagatttgcttgagtctgggaggtggaggttgacatgagccaagatcgcgccactgcactccaacctggccaacagagtgagacttggtctcaagaaaaaaaaaaaaagtcaaatcaaacaggcctgaaaaatgttgctaagtagtcctgctagttgttagtgggaagacttgtaacactacatatacatgtaaatattttctatacttatataaaattcagaaacttttagcattacggcataccagaaaatctgtctttagctacagttacacatctttacgttatttgtatgtttgttttgtggatacttatttgcatgtaactgtatttacttatttacacacatgtaaccataaacacctctgtctttttaccttgaactttccttaagataccttcactcttagtgacttcaatgtggttacaaccccagcacaggaaaagcccacgaggagttcttctacacagcagagcctgctgaaaccttgttgtaggttccacactgtactcacctggtcacccaaaaacccacaacaacaggtggaccttgtggcaggcttcaacacgaatctgagcttgaatgatgcttttctcatctgaaaaaaaaaaaaagacacaaagatttctttcgaggctttgtataggttgtacagttgttggatacggctgccggaaacaccatcccattcactttttttgggtactcaatgattaaatgtgtaataagggcccagcctgtgggccatgactggctttacctgattcccatctggccatctgctccgtaagaggggagaaagcagcttaacgctgtgtgcatttgacttgctcaacttactacgctggagagagattctatggtgactccacaggctttaaaaatatcttgtcacttagaggccctattaagtgactaaactgaatttttaacaatttatgtagtttattcagaactgcagagattttttttttaaggccctagagcagggtttcccaacctggcactactgataattctttgttgtgggggactgtcctgtacaacgtaggatctttaagagcaagcagcgtccctcttccccggcctccaccctctaggtgacagtagcagcctcccctccccacaatttgtgaaaaccacagtcgtctccagctacagccaaaagtcccctggggtgcggaatcgccccgggtgagggcgactggggttccctgaggaggcaacagcggcgcggggccccgacccaggagcaagcagcagcttcgtgctgacctaagctcacagcccgaggcctcatgaaccgaaacacggctccctggagggacgcagggcccgtggctggcggtgtccgcggcccacgtcgccccctggactcggacccgagcccccgccagtcgctcaccgagcccggcccctcccgcggggccaaaagcgccgactcgcggggacggagggactcgctccccgctgccccacgcgcggcccctcccacggtaccgccccgcgcttccgcttccggtctggggagaggtgcgctgcacgtccccttccggctcgcgcgggcagcctcgcagagtcgagcgtgttgggggttcggcgcttaggcgacaggcgcggcgggcgggagcggcggccgcgaaccccagccttgggcagaggtgttctagtttgcttagtgggcacaaagttgggccctggcctggggcagtagcgggggtaaggttggccctgggggcggggccaggctgtgagccgcacgaggcctgggggcggggctggttgtgggcggagatcagttccggggcggggctgaaggcggggaaccggctgaggccgtaccaggcctggagggcgaggctgattgggcagagaccagttccagggtcggggctgtgggtggggcccagttctcggggcggatggtataaggcttctagagcggggatgactgagcagagaccagttacaggggtggagacctccatttccggggcggggctgagcgggaaccaggctgtggttgtgacagccctggaggttggggctggctgtgggcggagataagctccgggccgggcggagggcggggactaggctgtgggtgtaccggtcttggagggcagtggtgattggcagagagcagttctaggggcggagctatggggtggcagcaagcctgggggcggggctgactgtgggcggagaccagttctgggggcgggactgtgggctgcaccaggcctggggagggggcagtgggtggagaccagttccaggggcagggatctgggtatgaataaaagggtgtatgatgtgggtgggttgggataggcccaggagccaggattgtgggagatcagattcaggggtagggccttccttggatccctagattgttgatacagttactgccccatgttcatacaacccaataggatcagattatgtatgcacatttgtctataacttgctttcccaaggcagaacatagtgatttaacactaagagtttaggggagcaggagaggactgggtcatagatacacatataggaaaacttaagaatggtacaaagtcagtcaaatattctcccaccacggtctttcagttcttttgctcagaggcaaaaataattttctcctctatctttccagatatagtgtggacatgtatgtgtgtgtatgtgtgtatgccgtagtcatattcatggaataaatgctattacctcccccccaacaagtctctgttttatacaccatggatatagactgaacaaaataggtaaacgtccttgccctcagagaacgtgcattttagttgtgagttgggcaggagaaatggacagtgaatgtgataaatagaatacatggtgggttggtgcgttagataccactaagtgctggttggacctggtggcttacgcttgtaatcccaacactttgggaggccgaggcaggcagatcacctgaggtcaggagttcgagaccagcctgccaacatggtgaaaccccgtctctactaaaaatacaaaattagccgggcgtggtggcggatgccttgtaatcccaggtacttgggaggctgaggcaggagaatagcttgaactcgggaggtggaggttgaagtgagccgagattgcagccggtgcactccagcccgggtgacgagcaagactccatctcaaaaaacaaaacaaaacaaaaaccaaaaaccataaacaaaaaaagatactggtaagtgcaaagggaaaaaattttatgtaagagagtggtaacatttaaaatcagccaggaagaaatactttcaatgaatgatattgtttcatgcacccgtcctttcagaaaaaaatagttagatctctgcttcccaaaaatatccattttcaggtggctgaaggaagtttaagcaaaaatgaacaagttcaaaattcaatatactaggaaagttcactgtggaaagactgttctcttcaacaaattgtgctgggacaactagatgccaatatacaaaagaatgaaattgggctgggcgtggtggctcacgcctgtaaccccagcactttgggaggctgaggcaggcagatcacgaggtcaagatatcgagaccatcctggctaacatggtgaaaccccgtctctactaaaaataccaaaattagctgggcgtggtggcgggcgcctatagtcccagctactcgggagactgaggcagaagaatcgtttgaacccaggaggtggagattgcagtgagccgagatcaccccactgcactccagcctgagaacagagcgagactccatcaaaaaaaaaaaacaaaccaaaaccaaaaaaaaacaaaaaaaaaaccaaccaaccaagaaacaaacaaaaaacagagaatgaaattggacctctacttcacaccatgtacaaaagtgagctcaaaatagatcatagacctaaaggtaagagctaaaactataaacttcttggaagaaaacataggtgtcaaactttgtgatcttgggttaggcaattgtttcttagatatgacatcaaaaacaggtggcgaaagaaaaaatatataaattggacttaacattaaaaaacattgatgcttcaaaggacaccatcaagaaaaaagacaaacatggactgggtgaagacatttacaaatgatttatctgatacatgacttgtattcaaaatatataaaggcttgcgactcagcaataaaaagatacccaattaaaagtgaacaaagagtttttttttttttttctttttgaggtggagtctccttctgtcacctaggctggagtgctgtggcaccattttggctcactgcatcctctgcctcctggattcaagcgattctcctgcctcagcctcccaagtagctgggaccacaggcgttcaccaccacgcctggctaatttttgtatttttagcagagagagggttttgccatgttggccaggctggtcttgaactcctgacctcaagtgatctgcccaccttggcctccctaagtgctgggattacaggtgtgagccactgcacccagcctgaaaaatgaacaaagagttcgaatcgtcatttctacaaagaagatacacaaatggcaaatatatacatgaaaagatgctcggccccattaatcattagggaagttaatatcaaaacttcaataaaatactacttcacacccattgggataattaaaattaaaaagatagccaataacaaagattggcaaagacaaggagaaattggaattcttatacattgctgtcaggattgtaaaatggtgcacccactttgcaaaatagtttggcagttcctcaaaaagtcatagagttgccacgtgacccagcaattttatttccagtatatgcccaagagaaatgaaaacatgtgttcacatgacagcttgtacatgaatgttcatagcagcattatacataatagcccaaaattttgtatgtcccaaatatcagtcaactgatgaatggataaataaaatgtggtatatccacacaacggattattattcatccattaaacagaatacatattccatggatgaaccttgaaaacattacggtaagtaaaagaagccactcataaaaaacccacattttgtataattcaatttaaataaaatttccagaataagaaaatccaaagagacaatagattagtggcaaatgttggggaaaagggaaatgaggggaagtgggtaatggtatggatttcattttagatgaaaataagattagatagtggtgacgattgcgcaactgtgtgaatgtactaaaaaccattttacacaaaagtgtaaaaactgtacactttaaaaggttgaatattatggtagctcaataaagtttttatttaaaaaatgtagaattatacacataaattcttcagttaggcataataagagaataaaagtggaaaaataaaatactacataaatatgagtgcttcttcctcaaaataatagaagaaaagtggaaaaagtaaaatactacaaaaatgtgagttcttctcttcttcctcttcctcctcctcctttcttccttcttccttactcctccccttcctcctcctccttgtcctcctccttcttctttcttctttcctcctcctccttcttctcttccttttcctcctcctccccccctctcctcctccttctttcttcttttttctttttttttggagacaggatcttgctttgtcacccaggctggagtgcagtggtgcaaacatggctcattgcagcctcgacctcctgggctcaagtcattctccctcctcagcttcccgagtagctgggactgcaggcgtgcaccaccacgcccagctagtttttgtattttttatagagacagggactcgccacaccacagaggctagtctcgaactcctgagcgcaagcaatccctttgccttggctgcccaaagtgctgggattttaggcatgaccccatcgtatccagcttaagtgtatcttaattttccacaccatcacattattaaatggcaaaacaaactggggataaataattgtaaaaatctatgacatgtgggctcatatcattattacataaagaatattttggataaataagcaaaagatgaacaagccagtaaaaacatcatcaaagacaaaggctatgaaccacacactcctttacaaatacatacaactgcccaatactctaattagcaaagaggcataaattaaaataatggcattatgtttgtgcctctcaagtaatgcaaaacattttaaatggccagtttgtcaagacatgaagaaatgaatgacctcgccctctgctagcagcattgataagtaccagtttctcagcaggtacttggtaacatatacccaaagctgtacgaatgtgcatatttatcaacccagcaattttacagtgatctaaatcagagaaatgtttgaaccttgttaaaaaggattgatcatctacctcctatttaatatgacagaagattagtaacaatggcaaaataagtactggtgtagccgtatgaaatgacattcatgggccttaaaacaacaatgtcaatgtacatttagttatattaaattacaatcgggatatattgttagatgtgagaagctggctgcagaatgaagtcggcagtgtgtatccatgttgtaacccacaaagtctaggaatataaaattccagggctcgacaaccacttaatgcctggaccctttctgcctcgaatgggggtggctagaaacttctctggctggagggcagaaggcagagtgcaaagttttgcctcaagccttgtgacagggataaagaccctcacccttcacactggcctcatggacaagacaagttcttgctttcccacagagtacctgagatctgaggatactttatactctgatagtcacttccggctaccttaattctgctagagtaaaaacaactagtagcttccacctaaccagatgacgcataaaataattgctactaaatatttcattccatattttggttagtaaggaagagaaggaggtaaagaaacttgaagtgaaacaactggaagggaccaagatggagcaggcagagttccttatacacaggagacagcaaggctgaaattctacccagaagatcagcagccctggccaggcacggtggctcacgcctgtaatcccagcactttgggaggccgaggcgggcggatcatgacatcaagagattgagaccatcctggataacatggtgaaaccccgtctctactaaaaatacaaaaaataagctgggcgtggtggtgcacacctgtagtcccagctactcaggaggctgaggcaggagaatcgcttgaacccaggaggcagaggttgcagtgagccgagatcgcatcactgcactgcactccagcctggacgacagagcaagactccatctcaaaaaaaaaaaaaaaaaaaaaaaaaaaaaaagatcagcagccccactatcaccttcctccagggcaaggccacctgtggaaatgacagatgtcaaataatccccaaaggaattgctaaggatggagatgtcccatggaaacaaactgcatattgcctaaccctctcccgaggacatggatatattgagatagtaaatgttttgaaggctatgcaactctgcaaacaaccaagcatgcacagaacacaggctgtctggtgataactcctagataagcaccaatatagcacctcagccacagatggcatgccacacacaatgaattctaaaagtctattttaacctgcgatggccaacatattctcatgtgtgcatgcaatcaatgtaaaaattattgagacgttttaggtgcgactggctggggctggcattgttggtggtaaaataatttcccaagacagtcgtaggtaaagaaagacagatttattagagaagatatgaagataggttgcaaggatgcaacaggcagcacagaagagaaggggccatttgcaaagaggcagaggttggaggggattttatagggtcgtgctggaggcggctatgtgcacgtgaggtgtgcagataaggtcgtgttcctgggactatgtgcagaccgaggtcttttggaacagaatgtcatgccagtgggttgtttgcagttagccatctctcagaacaattgttctcccccaaccaggggccctttccttgttgttggttacttatcttattaggactccacatgagaccttttaaatgatttttgttttttgtaatgagttccagaaatccagttcgtactttccactgatggcacatctcaatttgcgagttgaatgttatcagatgtacttgccccgtatttagattttcttttttttcttttcttttctttttttttttttttttgagacagagtctcgcactgtcgcccaggctggagtgcagtggcgccatctcggctcactgcaagctccgcctcccaggttcacgccattctcctgcctcagcctcctgagtagctgggatacaggtgtgtgccaccacacccacctgtattaatattatggctaatattttgtatttttagtagagatggggtttcactgtgttagctaggatggtctcaatctcctgacctcatgatctgcccgcctcggcctcccaaagtgctgggattacaggtgtgagccaccgtgcctggccatatttagattttctagggttcacagctgtaaagtaagattcacatgtccaggttgttccaagcatacttcaaagctttccacttcaagagtcatgtcagatgaataatgagaattcctttgggatctaacaacaaaggggtcattgtggccttagcaacagaagcagctgagaacggtgaaggaaaacagaagtttggggtggcctgaggagttgctggaggtgaggagataggagacatagatgtagatgatcttttctcagtggttcatagctaaggggaagggataggcagtagtggtgaaggagggggtcccaggaagtttaggagaggagtgtctgtgtagctcggagaaacttgaacatgtttaaatgccgaagaagggattcagtagaaaaacagaagttaaagatatgggggcatctgtaatcccagcactttgggaggttgaggcgggcagatcatgaggtcaggagttcgaggccactctggccaacatggcgaaaccccatcgctactaaaaataccaaaaaattagctggacatagaggtatgtgcctgtaatcccagctacttgggaggctgaggcaagataattgcttgaacccgggcagtggaggttgcagtgagcccagatcatcccactgtactccagtctgggctatagagcgggactccgtctcaaaaaaaaaaaaaaaacaaaaacagatgatacaaaggttacattgcaatattggaagcataaaattaacaaaaaggaagaaggaatgaggctcagatcactcttggtggataaaggaaacatatttatgtatttatgagacaaggtcttgctctgttgccaaggctagagtacagtggcctgattgccgctcactgcaacctcgacctcctgggctcaagctatcctcttcactcggcctccctcactcagctgggacctcagacatgtatcatcacccccagctaactttttaatttttagtagagatgggggtccccctacgttgccctgactggtctcaaactcctgtgttcaagtggccctcccgcctcagcctaccaaagtgctgggattagatgtgtgagccaccatgcctggcaggaaatctctttaaatacaattaaaggaaatttggaaacattcaatgcttatcagggatatttgcagatttggcaactaacgtctttgggaaccatcaggtaagttaaggagaattaaatatctatgaggaaaaaagaaagctggagaaaattttgcaacaggttttggggaaaatcaaggagtaaacatgacagtgcatacacagaaaataaagtttctacgcatgatggattcttcccagttgatggagaatattttgtatttatagtggcactaagacgtcatgtcacgtgattcttttttcagcagtgatcatatgacggtggtagccatggcgtcacagagaacagggaccttccaagtttgaagttttacaaggcaggtgtgataagtggtaaggaattttggattaatctaaatgaatttttttttttttttttagacagggtctcattctgttgctcaggctggagtgcaatgatgtgatctctgctcactgcaacctccacctcctgggttcaagtgattctcccacctcagccttccgagtagctgggactacaggtgtgcgccaccacacccagctaattctttttttttttttttggtagagatggggtttcaccatgttggccagcctggtcttgaactcctggcctcaagtgatccacccacctcggcctcccaaagtgctgagattacaggcgtggagccaccgtgcccggcctctaagggaaatattgaggtcgcagaccacagaatccaagagtgctaggaatcagaggagagagaggaaggtgaagatacggaggtccggagtaattcaaatacccaaatcacagatacttgctcctcaaggtatgttcatcaagaacaggtatctatggtatgggcatttgaattaaaaaacctggaaatcagaaatttatagtgggtgaataagttttccgatttatttatttatttgttttgagacagtctcgctctgttgcccagactggagtgcagtggtgcgatctcggctcactgccacctccagctcccgggttcaagctattctcctgcctcagcctcccgagtagctgggattacaggtgcccgccaccatgcctagctaatttttgtattttttgtagagatggggtttcgccatgttggccaggctggtcttgaactcctgacctcaagcgattcgcctgccttggcctcccaaagtgctgggattacagatgtaagccactgtgctgggtcagaattatttatttttgagcatggctgtttgggttgctgaaaatgtctggggtgtgggattaaggctcaaagagcagagcagttgataatttcattattgacttacaagctgcaggaactgtgcaaaccaagaggtcaatgtgttaaacagatgaatagtcaagtaatgcataagaatggcaggatttgggctgggcacggtcgcccatgcctgtaatcccagcactttgggaggtcgagggggggtggatcacttgagttcaggagttccagaccagcctggacaatatggtgaaacctcgtctctacaaaaaccacaaacagccaggcatggtgatgcacgcctgtagtcccagctacgcgggaggttcaggtgggtggatcacttgagcctggggaggtaaaggctgcagtgagctgtgattgcaccactgcactccagcctgagtgacggagtgggacaaaaaaaaaaaaaaaaggcaagatttgagatttagaaaaagactgtcatatttgtcatgagagggagtatcaggacttgagcatttaagagtgacaagggcagaaagagaataaaatagtactcaaacaaggagggggtttgcaggatgatgaaggagattttgaccttgaactttctgtgcttgactcaaatctgcctgatgatgtcccaggaagcaggtcagacctatccccagagggagagaggaaggatgaaagtccagaacagctgagatccttgtcctgagaaggcaggcttcattgatcaatttgaccccatttcatgatttattttaatagtgtaagaggaaaagaagtgtgatggccaagagttcacagaggaagcaacgtgactgtgtaaaccaatgcaaatcaaagcctggcttgagcacctcaatccctttgagaatgtccagttacacattcaagaggccagtaacgagaattacaccccatcctggcaatgaggtcagataccatcaatgggaggagagcttggagaagcctcagcaggtctgctggcagaggagactgcagggactccaggcttacagcagtgcaggagaactttcaagcactttggatcttgccaataccttgcaaaaacttgtccctagttacacaggtggatctctgctggaggatcttgccagtggtctggagcactcctgccccatgccccaccttgcctgctcttcagatgcggtggagataattcctgcagagggagtgggtatctcgcagctcctctgcaaacaatttctggttactgaggaagatatcaggaaacaggaagggaaagtgaagacagtcagagagagactcgcaatagcactgattgcggatggactcgctaatgaggcagagaaagtgagagaccaagaaggccgtcctgaaaaacgctaagaaaaaaagggaagatagtgcagatgaaataaagtgtaatcctttattaacatctctttgcagtgtccccaatgaggtttttttgctttaagctcttgaaactttaaaatatgccaatacttaaaaaaaaaaaaattaggctgggtgagcacctaagagcacctaagtaagtaagctcagaacagggtgcggtggctcatgcctgtaatcctagcactttgggaggctgaggcgggtgatcacttgtggccaggagttcaagaccagcctggccaacatggtgaaaccccatctatattaaaaatacaaaaattagctgggcatggtggcaggcacctataatgccagctactcgggaggctgaggcaggagaatcgcttgaacccagaggcagaggctgcagtgagccgagattgcaccactccactccagcctgggtgacagattgagactctgtttcaaaaacaaaacaaaacaaaacaaaaaattacactcctttgtgtgacacaagggaataaagacaataatttctttttgaggtgagagattgggtttcaggtgggcagggaaaggagattttttctttttcatgttatactctcatttttatttactatgtatgtatgtatgtagtccaggctggagtgcggtggtgccatcatgactcactgcaggccaggtgcggtgcctcatgcctgtaatcccagcactttgggaggccgaggtgggtggattgcttgagatcaggagttcaagaccaacctggccaacatggtgaaacctgtctctacaaaaaatacaaaacttagctgggtgtggtgatgtatacctgtagtcccagctattcgggaggctgaggcaggggaatcgcttgaacccaggaggcagaggttgcagtgagccgagatcaccccactgcactccaccctgggcaacagagcaagactccatctcacaaaacaacaacaacaacaacaaaaaccaaaaaacaaaacaaacaaaaaaccccaaaacaaacaaaccaaaaaacccaaacaaacaaacaaaacctcactgcagtcttgaactcttggactcaggtgatcctcctgcctcagcctcctgagtagctgggactacaggcacatgccattacatctggctaattttttctattttttgcagagacaaggtctcactctgttgcccaggctggtttcaaactcctagacttaagcaaacctcccacctcagcctcccaaaatgctggggttacaggtgtgggccaccatgcctggccagtattctatcatttttaacacatcaatctcagaaactggtaaatccatcaaacaaaagcaaattaatgataaagaggactggaataattcaataagcttgatcaggcaagtagacaaatagactttaactcgtattcccaacaagcagaacgatggtgcatcgttagattcttaacactgaaaagtctctctctcttttctttttttgagacaggggtcttactctgtctcccaggctggagtacagtggtgcgatcttggctcactgcaacctctgcctcctgggttcaagcgattctcatgcctcagcctcccaagtggctgggattacaggtgcccaccaccacacccagctaatttttgtatttttagtagagatgagatttcatcatgttggtcaggttggtctcgaactcttgacctctagtgattggcccacctcagcctcccaaagtgctgggattacaggcgtgagccaccacgctcggcctgaaaagtttttcttgatattattatccctcaaattgtgtcgactttcctgattcaaatttcaaacacatatagacttagagaatcagggaaagtctggtagttcattaaatgcaactctgaattaatgggcaatcaagaacagaaaaataactagagttagatagcttatttgagaacgtagatataaaaaactctttccttaaatattattttggaatccactgggatatttcacaaaaataataatcaattctgattgggtaggctttatcctgtgatgatgaggacaaagcactgaataattttataatcttgagtactgcctactgactttaagataagtgaattaagtcagacacagatagaaaatgatgcattgacctcacttctgtgtggaatctaaaaaaagtcatatagactggatgtaggctattggtattttttttcaagcaaacaaaacattaaaacacattctaaggctgcacgcagtggctcacacctgtaatcccagcactttgggaggctaacgtgggtaggtcacctgaggtcaggcattcaagaccagtctggccaacatggcgaaaccctgtctctactaaaaatacaaaaattagctgggtatggtggcacccacctgtaatctcagctactcaggaggctgaggcaggagaatcgcttgaacctgggaggcggtggttgcagtgagctgagatcgtgccattgcactccagcctgggcaacagagtgagactccatctcaaaacacaaaagaaaacaaaaccaaaaaaatccccacattctaggacacacatgattaccacgtggaagcacagagcagaaaagatgaaattttaaaataacaaatttttagggaagctataaataatatagatattgcactctattttttttttttagagatggggtctcactgtgttgcccagacttggagtgcagtggtgcaatcatactgcagcctcaacctcctgggctcaagggatcttcctgcctccgcctccctagtagctgggactataggtgtgtgccaccacatccagctatttttttcttttagtagagatgggggtctcattatgttgccaaggctggtctctaactcctggcctcaagcgatcctcctaccgtggtctcccaacatgctgggattacaggtttgagctactgtgcctggcccatagaaccatttctgacccgtttatgtcttcttggtctacttcccattgtagaggacccgtgagatggataatatgccacccagggaacactaatctggaaattctggtgcatttgagtttcagagaatgaaatagtggaagagaaacttgcaactgccagggtttcttgggggcagggatgtgggaatataaaggaacaggatgggtgtgatggctggtataggagtcaagggtgggtgtgtactgagtgacaaaggtgggagaccttacactgaagtggaatgttgattttccaccatggcaatttcttttttctttttttgagatggagtcttgctctgtcgcccaggctggagtgcaatggcgcgatcttagctcactgcaacctccacctctcagattcaagtgattctcctgcctcagcctcccgagtagctgggattacaggcacccaccactaaacccagctaatttttttgtatttttagtggagttgggtttcattatgttggtcaggctgttcttgaactcctgacttcaggtgatccacctgtcttggtctcccaaagtgctgggattacaggtgtgagccaccgtgcccagcctccatgatggcaatttctgtatcagtgaaacaggaggattccctgagctcccttgcaggacatgtgacaggggtgtggctcatctgtttggctgctgggtgcactcaaaccccttatgggacggggagcacacagacaggcaggtgcaggagccggggccagtgtccctgggctctggccccatggcagcatccacaggtgggagactgcaactcccaaagcccaagtggctgtgtgttacagtgtgctccttagccttgctgtctgtggatggctcaagtgttaaccagctcagtgccctcttggtacccaagtccttgtccagcatccaggaagaatcaggtcacacatagacttgaaggatgaatgccagggttttgttgaatgggggaggtggttctcagtgggatggatggggagctagaagggggatggagtgggaagatgatcttcccctggagtttggctgtccagtggctagtctcctctctgactgtccccagttgaactcctttcggcattcagatgctccttctcttctctctgctgtgtcgttctgccattcttctgcttgtggagcctggggtttgaggtttatatgggtataggataggggagcatggtgggccaaaaggtgactttggggcatgaaaacaggattgtctgttcccatttagggccacaggtctccaggcttgagggtggggcctttgctggggaacctccctcttctacccagtatttccctgtctcctgtccatatcatcagtaatgtagtttggatatgtgtccccaccaaatctgatgttgaattgtaatccccagtgttggaggtggagcctggtaggcggtgcttgggtcataggggcagatccttcatggtttgatgctgcctttgcaacagggagtctgtacttgtgagatctggttaagtgtgtggcacctttgctccccccaactctcccttgctcctgctctggccatgtgacatgctggccctctcttgtgacatgctggccctcccttggccttcaccatgattggaagcttcctgagacctctccagaagctgatcagatgctgacatcatgcttcctgtacagcctgcagaactgtgagccaattaaacctcttttctttaaaaattacccagtctcaggtatttcttttttctttgttttttttttttttttttttttttttttttttgagacaggatctcactctgtcattcagggtggagtgcagtggtacaatcacagttcactgcagcctcaacctcccaggctcaggtgatactcccacctctgcctcctgggtagctgggactacaggcacgcaccaccatgcctggctatttttaaaaatctttgtagagacagcattttgccatgtttcccaggctggtctcgagctcttggactcaagcaacctgcctgcctaggcctcccatagtgctaggattacaggcgtgagccaccgagcctggccaggtattttttttttttctcttgttctttttttgagacagagtctcgctctgtcactcaggctggagtgcagtggcgtgatcttggctcactgcaacctctgcttcctgggttcaagtgattctcctgtctcagcctcccaagtagctggcattacaggcgtggaccaccatgcctggctaattattgtatttttagtagagacagggtttcaccaagttggccaggctccggtcttgaactcctgacctcaagtgatccacccgcctgggcctcccaaagtgctgggattataggtgtgagccactgcgcccggccaggtatttctttatcacagtgcaagaacagcctaatacaatcattttcaccaattctggtgttcccaagggatgacatggtgcgaaaccacaacacacaactgagagttgcctttgggacttcacgaaggtggaagactgttctcttagtccaacatgaaccagtcaggggtcacgtcaaggaaggctcagagactgtgtccgaccaatatggtttatttctgccccagccaagcttctttggaccctggctgggggaaaggcaccccaggcaccggcaagttccagtcattgcagatcctccaggtctaggtgtgactggtagtagcctgggcactgttgctggacgttgtattctccttccttcttccgccggcgggtggtcacctatgagggtgaggaggaggcgtgagaatggactggtcagccgtccagggagaggagaccacaggggtgagaatatggccaaagccagaggccttatgcttcctctgtctcccttcattgtttcatttaatttctccctcagttcttttcctcttttcaccactttcttttcttctgtctccttgtttcactctcggtttaaaaaaatttttccccctccgatatccccttcatttctctctccttttgcctctgaatttctttatcaatatatcacatatctaccaatgatctatttatctatcatctagctatcaatatttatcaacctgtcaatcaattatctaccaatcaataaccatcaattatctctcacctctcaatcatctcctatttataatccatcaatcatctatcaatcacctgtcatccatcaatcatgtatttatcatctacttatcaatatctatcaactatctgttacctatcaatttattatctaccaattatctatcaaaataatctatttatcatctacctatcagctatccaccaatcatctgtcaactatcaatcatctatcgcctgtcttctgtctaaataccatttctctctcatctcattctcagtctctttctctctggcttttggtcctgatctcagccccctctctccctcccttcctcctctacatctgtccagcttaactgaggcataactgacataaaataaactgcacacatttaaagtgaatgttttgataagttctgatcataacttattgaatcgtcaccacaatcaacataaggaacatccatccatcatccccaaaactttcgtcctggccaggcatggtggctcactcctgtaatcccagcactttgggaggccaaggcgggtggatcacctgaggtcaggagttcgagaccagcctggccaacatggtaaaaccccgtctctactaaaaatacaaaaattagctgagtgtggtggtgcgcatgtgtaatcccagctacttgggaggctggggcaggaaaaacgcttgaacccgagaggcagaggttgcaatgagctgagatcgtgccattgcactccagcttgggcgatagactaagactctgtctcaagaaaaaacaaaaaaaaaacaacaaaaaaactttcttcctgctcttttacaattcctttttccctgccactgcaaacacattttcattcccaggcaaccgctgatctgattcctgtccttacagattagtttgtattttctagaatttgtctattaagggaatcatatggcatgtactcttttcttcatctggattctttcactaggcataactattttgcaatttatacatgttgctgtataatttattaatgtattaataattcctttttgttgctgaataatattccattgtcaggatatatttgttaatggacattagggttgttttcagagtttggctattacaaacaaagctgttatgaacatttacttgtgtacaagtcttcatatagacatatgtttttatttctcttagataaattactagtagtgggatggtagggtcttacggtaggtgtgtgtaattttcaaagaaatggccaagctattttccactttcactttatgagagttccagttctgtcacattttcaccaacacttgttatagtcaatcttttcaattttatccattcttgtgaaaagtggcctctcattgtgacttccgtgtacatttccctaacgactaattttgttacatttttccctcttacattattttatttacactctttgcaatcactttttctctcaatatcttgtaatcagcatataggttgtgaagtttttgagatctgcataacatagtaactatagttaataataatgtagatttcaaaattgctaagagtataggttgccaatgttcacaccacaaagaaataataagtatgagaggtgagggacatattaattagcttgattgagtcattccataattgtacatataccaaagcatcacattgtatcccctaaatatatgcattcattatttgtcaattaattaaaaataaaattataaaaagaaaataggaaagccactccgtgaactgggagaaaatatttgcaaaacatatatccagcaaaggacttgtgtatagtatagtatggttttataatatattaagaactcttacaacccaattgttaagaagacaagcaacccttccttgctcaccaggacaccgcagatcaggcatgtgatgactcccaggagtcctgccaagccgatgaggatgacagcccagaagggaaggtctggggagacaagggctggggtgagccacctcctgccacgtcccagggctccttcttggaccctatgtggcctgaggatgggcacagccctggggaagagagcttagtggctcaacacctcatgcctctgatgcccccaaaaactgggcccccagaaagccaggatccctgctatccctttactatgcctcaatagtctttgccatgggttggcaattttgatcctcatccaagactctgtgtgcctggtgctcttggacaaggcaaagcaccatcaggctaccccctccctaccctgggctggggcttctttgagacttaccagaattcccagttaagggctcatttctgttgggagaataccctagaaatgaaagaaatggagggtgcatgtgagtgtgtctttttttttttttttttctggagatggagtcttgctctgttgcccaggctagagtgcagtggcgtgatcttggctcactgcaacctctgcttcccgggttcaagcaattctcctgcttcagcctcccaagtagctgagattacaggtgcccgccaaaatgcctggctaatttttgtatgtagtgatggagttttaccatgttggccaggctggtcttgaactcctgacctcatgatccacccacctcggtctcccaaagtgctgggattacaggcgtgagccaccgcgcccggccaagtgtgtcttattcttttaaatacaattttacaagcgtacaaaaaagcagagagaagagtataataaatatgcatcacctagatttagtggtttatatttcctccaactaaaacatatacatccaatttatgatttattgacatttcagtgaaagtaaatgttttcactgaagttttagaggccagtagacaccatgacatctcaccccaaatatttcaatttgtatctctaaaaaaatgacacatggctacataagcccaaagccattattccaccacaagagtgtcataagttaaattcatgcctctgggcatggtggacctaaattgggctgggcccaagggcagtggtggagagaatggatcatcgcagttggaaactgatgggacctctctaagttttaaaattttcacccaaaaggtttttcttctgcctaaaaacacatttaagctctccttcacttggtggttttatcgtcatcttttagaattcaccttcaatgtcatttcctccaggaagccttccctgatgaccacacccatgtatgaataggttcacatcaaataatttataattgacaactgcctgttcttgttattcctcacgacagcataaactccatgaagacagggatgtaaagccatcatcaggcatggcgagaagggttactggttcctctacttctacaaccctgttatagccaactttttttttttctcaagatagagtctcactctgtcacccaggctggagtgcaatgatgtgatctcgtctcactgcaacctccgcctcctgggttcaagtgattctcctgcctcagcttcctgagtagctgggattacaggcgcaccaccatgcctgggtaattttttgtatttttagtagaggcagggttttaccatgttggccaggctggtttttaactcctgacctcgtgatccgcctgcctcggcctcccaaagtgctgggattacaggtgtgagccactgcgcccagcccatagccagcttcttaaagatgtagaagacataccaatggctaacaagcatatgaaaaaatgctcgacattactaataatcagagaaatacagattaaaaccatgatgagataccaccttacgccagtcagaatggctgttactaaaaagacaaaaaataacagatgttaaaaaggatgcaagaaaagtgaaccgttacacactgttggtgggaatgtaatttagtataatctctatgaaaaacgtggagatttctcaaataactaaaaatgaaactaccatttgatccaggaatcccacgactgggtatctacacaaaggaaaataaataattttgtcaaaaagacacctgaacctgtgtgtttatcacaaaactattcacaatagcaaagatatggaatcaacctaagtgcccatcaatggaggactgtataaagaaaatgtgatctctctctctctctacacacacacacacacacacacacacaatgcaataccacccaggcataaaaaagaatgaaatcatgtcttttgcagcaacatggatgcaagtgaaggtcattatcttaagtcaaacaactcagatacaggaagtcaaatagcacatgtatttgactaaataatgcatagacatgtcaatgctaaataatgcataggcatggacatagagagtggaataatagacagtggaaacttggaagggttggggagtggaggagagtggatgatgagaaattactcaatgggtacaatgtacattattcaggtaatagataccctaaaagcccagacttccccactgggctataaatccatgcaacaaaattgtacttgtgccccttaaatatatacaaataataattttaaaaagtagtgtgcaatatggagcagccacaagtggctttttaaattaaaattaaataaaattaaaacttcggtatctcagttacattaaccacacttcaagcttagtaatcacacatggctttgtgctgaatagcacagatagaaacattttctatcactgcagaaagttctattggatggtactgattcaaggcaaggtttggcaaactacagcgatgctgggtccatggcctgtttttagaaagcttgtgagctgacaacaattttaattaaaaaaaaaattggggctgggtgtggtggctcacgcctgtaatcccagcactttgggaggcccaggtgggcagatcacgaggtcaggagatcgagaccatcctggtcaacatggtgaaaccctgtttctactaaaaatacaaaaaaaattagccagacatggtggcaggcgcctgtagtcccagctactcaggaggctgaggcaggaaaatggcatgaacccaggaggcggagcttgcagtgggcggagatcgtgccactgcactccagcctgggtgacagagcgagactctgtctcaaaaaaaaagaaaaaataaaaacaaataaaaaacaaaaacaaaacaaaacaataacaacaaacaaacaacaaacaaaattggtaaaacaagaaaaagaaaaacctgtgacaggcatgtgaaaggcttgttgattctgaaggatcaacagtgctctcttgcacaacaataattcggaatcaaggacagtgcacacaggcattggaaggtcccgtctaaaacgttattcgcatttgacttgaaaagaaccttgtatgaaatctagttattccttctgcaaatatgacttgagtgtttattatgtgccaggcagaatatggggttcttggaatatagtggtgaaagagcaaacagttactctctgttatattcctgatacatggtacaatgtatataactattctttgaatgggtaaaattggatatgcaaagttgagccaccttgaagccatctctggagttggaaaataggtccatcctaccacatttgttgaggatgaatcacatacaacttgaaactggaagccctcattgacctgctgaggcaggaggatcacttgtggccaggaattagagaccagtctgggcaacatagtgagaccctgtctctacaaaaaatttagaaattagcaaggcgtggtgacacgtgcctgtagttccaggtactcaggaggctgaggtgggaggatcgcttgagcccaggagttcaagactgcagtgagctatgattgcaccactgtactccattctggttaacagagcgagaccctgcctctaaaagaaaaaaacaaacacaaaaaaccagaaccagctgcagtggtgcctgcctgcctgtaatcccagcactttgggaggctgaagcaggtggcatgcttgagctcaggagttcaagaccagcctgggcaatgttgcaaaaccccatctctagaaaaaatacaaaaattatccgggtgtggtggcgcatggctgtagtcccagttacttgggaggctgaagtgggtggattgcttgagtccaggggttgaggttgcagtgagctgagatcatgtcactgcactccagcctaggtgacagagtgagaccctgtctcaaaaacaaacaaacaacacaacaacaataactaatcagggtaattgtttaacactgcagctgcctgggggtggaggagcaataccatctagggcaggcaagatgggaaccaaaaaccaagtggcttgctaagtacagagagataagaagtccagaaaggagatgtgactagcctgaggtcacagagctggccagaagagggcaaatgcctcccatatccctcgggcgtccttttctttccttcaatgatgggtaaagcttaggagaactaagccactttctcccagtctgagaaagctcgatgacgaatcaaccccaagccttcagattcccagggaaggacccaggtgaggaagtgggagcttccacctcagtcccaatgacccagggagctttaccatccacaaggacactgctcctgtccagggtgaagttctgcagctgggtaccattccgggtcatccgcagaaattcctcatagatggcaactctgtctactctccgagccagtggcgagaagttacacagggagtccaccccggtgtggtgcctgttggggacagacctggaaggggacagggataagcaaagatatctgcaattttatcatgattctaggctttctccttctaggctcttcctgcagaaactttctgcaatgatgtaaacattctatgtcggccgggcacagtggctcacgcctgtaatcccagcactttgggaggcccaggcaggcggatcatgaggtcagatcgagaccatccatacaaatcacgaggtcaggagattgagaccatccatacaaatattagctgggtgtggtggcacgtgcctgtaatcccagctacttgggaggctgaggcaggagaatcacttgaatcggggagtagagattgcagtgagacgagatcacgccactgcactctagcctggtgacagagcgagactccatctcaaaaacaaaacaaaaaacaaaaaaaaaattctacatctgcactacacaatgcagccattagtagcttcatgttgttattaaatgcttaaaatgcagctagcgtgggagaagaactgaatttctaattttattccacttaattcatttaaaaatagccacagggaggtcaggcacagtggctcatgcctgttatcccagcactttgggaggccaaggcgggtggatcacttgagatcaggagttcgagaccagcctggccaacacagtgaaaccccatctctactaaaaacacaaaaattagccggtgtggtggtgcacatccataatcccagctacttgggaggctgaggcaggagaatcgcttgaacctgggaagcggaggttgcagtgagctgagattgcgccactgcactccagcctgggcaacagagggagactccgtctcaaataaataaataaataaataaataaataaataaataaagtaatagccacagggagaacatttctggaatgttggggtaacaacttctgaatacccataaaatcaatgagaacattggccaaaatagtccaaatcaatttttccagaagtctagaagtgaaccaaaggcttgcaaaaattcgaggggtgtttagttaaggaaagtgttaaatctcagtaaaaagagcaagctttgtggcattttaacttgcattatttccacagtgctctttcaagatcctcagtattttattattattattatttgtttttttttttttgagacaggctttggctctgttgcccaggctagagtgcatggcacaatgtcagctcactgcaacctctgcctcctgggctcaagccatcctcccacctcagcctcctaagtaactgggactacagcacatgccactatgctcagctgatttttgtattttttgtagagatgggttttcaccatattgcccaggctggtctcaaactcctgagctcaagcgatctacccaccttggcctcccaaagggctgggattacagtcgcaagccactgcatccagcaagatcctcggtaactttgaaaactggcagcctcagaatcatgatatctgtgaaaaccagctgcctagcagtcaaaatagctgtagagttctccagacatcaatctgcagaacatagtcactatttgatctgtttggcagctccttgaaaaagccctattctcagggcttatctttatttgttctgattcagaatttgtttagtgaggaaagcctgttctcaaggcagttgtcaaaaaaaaaaaatcattggtaccccccaccattggaaatgatacctctcattgaaaagcacagttaggctgctagattctaagtaatctggttttagtcccctccttcccccgtcttccatgggtcctgatttcagtagctgatgtcttaatgtagtagattctacactctagactccatggcctcagcaccaggtacctttatgtctgctgagatttacaccagctctcttgagtgttgaagccagttgggctccagctttaggaaaaagctagtttttagttaacagctctctatttctagggctctcttccatcaaagctatggcttggggacacttctatttaaaggacagcagaagttcctagagtcattaggtcctgagttagaacttacctgaatgttgaaacttgacagtcagaaaaataactcttgatgctgctgtttcggaagagttggttgagctgaaagacagggcgatgtttcttaggtcagaatcctggccccagtagcatcagagaattttcagccactgagcacacttctccgtctattttgcttcttgtcatgacaaccacttgcccaggtatgtatatcaaaggacatgctcttctagggtatgacttagctgtgtgaccttgggtcagctactgaacctctctgtgcttgtgtattaaatgggaataagaacctgtctttgtggattgttataaaaagtcaccctgtggctacccagtatgcataagtcagtttctgcatggcaacagagtggacataccacccccttctcaccgcatcctcaatattccttttgttcctctggtaattggtggtgcctggctgggctttgtcctgggaatatggtaggttggtgatggtgaaattcaggtagaagtgctgggtgctggagctgcttgttggttgataaactgatgactccatttctagaattaaaaaaaaagtatgtaaaaatccactatcaaggcagggttttaagaaagagatgattccagctagcttacttattcctgacagtgtgagctgagctaggcttttctttttttcttttctttttttttttttttttttttggcaggggggtcatttgttttgttttttgagacagtttcactctctttgcccaggctggagtgtaatggcgtgatcttggctcaccacaacctccacctcctgggtgcaagccattctcctgcctcagcctcccgagtagcgggattacaggcatgcgccaccctgcctggctaacttttttttttttttgtatttttaatagagacagggtttctccatgttggtcagactggtctcgaacccccgacctcaggtgatccacccgccttggcctcccaaagtgctgggattacaggtgtgagccaccgcgcctggctgagctaggattttaaaggtgggatggagggttttaggtaacagctctatattggatggaggatcttcctccatccatctgtccagcttgtatccatccacccatctacctgttcaattctctttctaccaagcattgtaagaattctctacaacatgggggaaaagagactgggtttctctgggggtgtagtcagcaattgcaggtgctgagaaacccagagtcttctaactaatgatcattgttcctaaagggtcttcttgcctttgctcttctctccccccaccctccattctgcacacagcacccagaggatgagcagaattcatttcattttctttctaaagcagaactcatgagtgtgtcatgttcctccccaagccattccagtgcccaacaaagtctctgcccacatctttggcttcaactgtcacctctccagtatcaaagtggatgctccagctacaccaatcttcttaaacttgccccaaaatgccactttttttttttttgaaatgcagttttgctctttttgcccaggcttgagtgcaatggcacaatctcggctcactgcaacctccgcctcccgagttcaagcagttctcctctctcagcctcccaagtggctgggattacaggcacgcaccaccatgcctggctaatttttgtatttttagcagagatggggtttcatcatattggtcaggctggtcttgaactcctgacctcaggtgatccacccatctcagcctctgaaagtgctgggactacaggcgtgagccaccgcacccggccagatgccatattctttctatcttctaggttatagatgcatggagcacaattctccatctattacccctggctaggtcccattctctgtcagatctcagcttcttcaccccttcctacataaaactttccaagacaaggttgtgtgttcctccttggggctcccacaggcccctgaaattcccttatcatagcaatgatcacactgtgttatcagtacgtgtttacttccattgtttatttattttttatttttatttatttatttatttttgagacagagtctccatctgtcgcccaggctggagtgcagtggcgcgatctcggctcactgcaagctctgcctcccgggttcacgccattctcctgcctcagcctcccgagtagctgcgactacaggtggccaccaccatgcctggctaattttttttgtatttttagtagagacagggtttcaccgtgttagccaggatggtctcaatctcctgacctcgtgatctgcctgcctgggcctcccaaagtactggtattacaggcgtgagccaccatgcccggcctacttccattgtttattgaatgaatgaattattcatttactgattcattcatttaattgatcattttaattgatcaattaatcaattaaatcaattctcaattacatcaattaatcaattatgtactgaatcatttattattcattaattaaatgaatgaatcaataaattgattcaaaataaatgatctattgattcattcattcaacacaattctttttacatgtaaaaatagctattctcttagatgcaatggctggtgttctgttcctgcctcgttggatgatctactgccagaggtcacctacatgggtctccagaaagcctccctttccctctctagagcctccaccaattccactggtaccgagaagccccatctttcctcataaccccacctcttccagttaggaaaccagccaccccaccttgtacctgtcacatggatgtccaccaactggtaggtggagcccagccaatggaatgaggcattcagggtcttatctagaaagacttgctccaccaggctggggtccaaattggaggagaacaatgccttgacagtgaccaacacggagtccatcctagggacagagaccacaggaattcagccagtactcagcatcagcagggtcatcggttgctgtctttaaagagcaaaagatctagaggcacccaccctcagtctagagaagggttctgatcaaaatgggaggccttcggctggatgcagtggcccaagcctgtaatctcagcactttgggaggccgaggcaggcaaattgcctgaggtcaggagttcgagaccagcctgaccaacatggcaaaaccctgtctctaataaaaatacaaaacttcaccgggtgtggtggcgcatgcctgtagtccctgctacatggggggctgaggcaggagaattgcttgaacccaggaggcagttgtagtgagccgagatcataccactgcactccagcctgagcaacagagcatgactccatctcaaaaaaaaaaaaaaaaaaaatgcttccaggaattacgtctagaagcaataacagtaacaataatcgatatttattgaacactttttatagatcaagaccactaagaagtgacttatgcattcttcatcatcactctggtggaaggtattgttaaaattatcccaatttctcccacattttccctcttgatttctactttttattattttattttattttttgagatagagtctcgctctgtcacccaggctggagtacagcctcctaggctcaggcgatcctcccacctcagcttcctgagtggctgggactacaggtgtgtgccaccatgcctggctaatttttgtattttttgtagagactaggactccctatgttgccctcgctggtcttgaacttctgggctcaagagatccacctgccctggcctcccaaagtgctgggattacaggcatgagccactgtgcccagcctacttttgattttatttgtttttaattttttggggtacatagtaggtgtttttatatttatggggtatatgagatgttttgatacaagcatgtaatgcataataatcatcagggtaaatggggtatccatcccctcaagcatatatcctttgtgttgcaaacaatccaagcatacacctttagttatattttaaaatgtacagtgaagttatttttgactacagtcaccctgttgtgctagcaaatactaggtcttattcattctttgcatttttttgttccaattaaccttctccatattcccagctgaaatacaaaaatctttgaagtttagaaatatacaaagtcagccctgtgtcctgtgaccctcctcttcccaagtataggtatcttcattccttcatccagtcatcagagacctgggttcaaatcccaactttgacagttcttgggaagttcacttttctgaccctcagttttcccatctgcacaatagggatgatttttgcactcaactcatagattctgttgtgagaattaaatgagaggaggctggttgatgttaaatattattattgggctaatattttgagttctacatcaaaaagttatattttcccaagtgtccagaaaaaaaagaaggtgtatgctgggagttggtggccccatgaggttaatcctcactccctaccttgaggatttatgggaggagatggtaggattagctagacagggatgtaggggagaatgggtaccccactggggacgtctagctcaagggtgctcagagacacagccacaagcttggtcactgcttatgaccttcagaacttacgtcaagttggtgaccaggcagaagcggaatgtgtcatgtagttgactgcctttgtagagtgtggtgacctagaaagatgggtagggagagtgggtgagatggaggcctcttgggggtggaggggccgctgatgccagtggaaaaaaacacaggacttggagcaaaggggaccagagttcaaatcctaactctgttcctaaagcactgtatgaccctaggcacaccacgcccctttctgagcctcagtttgcccatctgtgaaatgggaatggtagtcaagagagtacttttggaaactgagagagaacccagaatacatagtgaagtgaagcatttaaagtgatcacttaacagagaaatcaggtagaagagggagagaagcacacaggacagagaagacgggaggggtgagagatgccccaccttgtcctggatgtccctcagcagggtgatgtactctgaggatgtggggtctggattactgaggttccagttgacaatgtggaaatttatctggtactcgccccggattgataaattctggggtgcatagcctggagccacagagaagaagaaaaggcaacatatggtggggaaatgttgatcacaaaatgcagagccaaagttgcccagcagtcccctgcctactgtcagaatcaatttcaggtccacacgctgggcattgcaggagctcttagacagaaagttgccccaaagagagggaaaaatggaatattacacagattcttctgagctgagctttcctgcatgtgctatgcagttcccacttctaggaatgcatccttttcatttcctgcaaaactcctgctcacgcttcaagagcccagtgagagggagctccaggacagcagaggcccaagtctgtcttattcattattgtgtcccggcacagggccgggtatataacaccctcctccaggaagccctccttaatttactcctcctctcagctcccatagtaccctgttaataacagcagtggggtctttgttgtgcccgtaatttgttgttaacttgagtatgagtttttcagagacagaaaaatgtgtcttctatctccagacccagtacaaggcttggggcagaacagccacccatatatgtttgctgaatgaatgaattaatgaatgtgagttacagcagagacacaaatctttaatttgctcactcattcaatgattctttccatactatgatgtgctgatgtactgcgaaccgagggtacagtggcactcataatagaccgtaattttgttgagttcacagggtaagggggaatcagataatttaacaagtaattacagtaaagtgtgataaatgtcagccttgtgcccacctaagaactttgagaccatgtacaacaggatttctcacccttgaaattattggcatttggggctggatcattccctggggtggttgtctcctgtgcactggaaaatgggctaccgacccactaggtgccagttgcaccctccttccctccctgagttgtgatacccaaaaatgatttcggatattgcctagagtctcccagttggggggtggggtggggcagaagtgcagaattgtcccctggtaataaccactgacacagaggatccttatatagaagggacctgctatcctgtcccaaaggatgccacgactcagccacttgggttttgaattgaaattcattatggatgtacctggggggggttcattatgctaagtgaaatataccagatagagagaaacaaatactgcatgatctcacttatatgtgggatcagaagtcaaacttacagaagcagagagtagcatgatggttatcaggggctgggggcatgggggtggtgatagagaaaatggggagatgttggtcacaaaatacaaacttttagttacaagatgaataagttctggggatcgagtataaagcttgatgattatagttaataatactgtattgtaaacctgaaattttctatgagggtagaccttaaatgttctctttctctctaactcacacagacgcacacagacacacggtaactatgtgacatgaaagcagtgttaactaatttgatcatggtaatcatttcataagctacacatatattaaatcactgcattatacatcttaaatacatacaattgtatttgatagttataccgcaaccaagttggaaacaaaagtgaaggagaaagagacaaacaatttatgacattaatttggtcaaagaatttcatgctatttactcaaaataatgggaaagaccctccccttggtggtttggggaagggtgtcccccagccaggccttgggctattttttttagagaggaaagggcatacaacagggacaaataatagtcatggtgggccgggcatggtggctcatgcctgtaatcctggcactttgggaggccaaggcaggtggatcacctgaggtcaggagttcgagaccagcctgggcaacatggtgaaaccccatctctactaaaaatacaaaaattagctgagcgtggtggcatgcacctgtaaatcccagctacttgggaggctgaggcaggagaatcactgttgcagagccaagattgcaccattgcactccagcctgggtgatagagtgagactccatctcaaaaacaaagaaaccaactccccaaaagtcactgtaaatccaagttcagcctgacactcaccattgatgaagaggctatccctgtccaggacatagaagcccagttgggtgacaccatgggtcagctgactcagctcccagtaaagctgctgtatgtccagcccggggcccacagggtcagggtggtaggtgcaggtggtgtccacaccagtggctgccccatccttctcaggcctggggagagaggcatttgaggactctagagaggtcccgagacctctgcaggtaaagagcagtggagggaggagcaggggaaagctgaggaaggggtggtcacaaaaggggtggttgttactggcaaatggccaggaagtggtctcacctgagggagatcagttggcaacccaagtagaaggggcccatgctgctcttctggaacaagggtctgagcttgagaggaaggaggaagagggtaagccgaggaacagaggttgggggtaggatttatcccaccaggagctgctgggaccagggtctcaccaggtgctgaaggaccccctcggtggagttgaatgtagctgagcccttgcccatatctggtgaatactggagattggagatggtgaagttgagtgtgagggtcttcaggtggtaccccatggctgcaggaggggaggagagacgtctgcaactgagggctggtctgagactagatcagactgcgctcattattaactagtgtggccatccaagtcagaagctatgtgtcttctcccctccaagtaacaccaattctctttactgaatattcatcacatatatcctctctctcctcccctatcccagttcaggtcttattttctctcaccctgattagcacctggcagactcactggatgccctgtctaaaggacattctctatactgaacacaagaagaatctttctgaaatgacaatctcactatggctgcccctgctctagtaccatccacagctccctatggccttcagtgttaagttcaaatttcttgacttggcattcaaggcccttcccaatctggctcctgctgacctttcagtctcacttatccatccactctgggttaagctttatgtttcatgcaaaccaaatttctctcacttctccctatactctatgctgtttctggccactgaggctttgctcacagattcccctctttcagttatactattcatgccctatttgcctgaatcactcttagtcatccttaaagactcagttcaggtgaaactttctccagaaagccctcctccttcccaactatgccaggtatctcaccccaaaacatctgacattatgatggtctatttatttcataaaatctgggactccacgagggcaggtgtctgattgaaatgctattctaatcttcgaggaggaaaaatggccccaaatacctgttgtggcttctgacagaggaggcaggaatgtggtggctggcttgggagctgtggaaggaacagtccatcagagaggacaaaagcccaccacctagtgggagaagctcccctgggcttcatcagtggtccaagccaggacaaccattcacaggtgggccataaatgagactgagggaaggagtgattgtgtgagtggaggagtgagcaagatggatggatggatggatggataaaaggacaggtggaaggaaggacaagcaggtgaatgggcaagaggatgagtgggtggatgggcagatggatgaatggatggaaggacagaaggaaggaaagacaagcagatgaataggcaggaggatggatggagagatggagggatggttggaaggacagaaggaaggacaaacaggtgaatggggaaaaggatagatggatggatgatggatggatggatggttggaaggacagaaagaaggacaaacaggtgaatggggagaaggatagatggatggatggatgggtggatggatggataaaaggacagatggaaggaaggacaattgagtgaatggggaggagaatggggggagagatggctggctggatagatggatggatggaaagacagaaataaggaaacaggtgaatgaagaggagaatgaatggagagatgggtggatggttggaaggacagaaggaaagacaaaccagtgaatagggagaaggatggatggatggatggtggatggatggagagatggataaaagacagatagaaggaaggacaagcaggtgaatgggcaggaagatgggtggatggatggatggaaggacagaaggaaggaggggctagcgagtgagtgggcagaaggatgggtgggtggtggatgagtggatgggtggatggatggatggatggatggatggatgtatagaaggacagaagaaaggagggacaagcaggtgaatgggcaggaggatgggtgatggatgaatagatggataaaaggacagatggaaggaaggacgaggaggtaaatggtcaggaaaatggggtggatggatggatgggtaaatggatggacggatggatggatggaaggacaggtggtgtctgagagatgactggaaggatagaaaaatggatggctggaaagatagacgagtggatcactggatgaggcaatgggcaaatttagccaaaaccagtagccagcagagtctgcagcttgaccatgaagcctctgctggggcacttggaggagattttcttatcaggaggtacagactaacaaggtcatcatctgacctcaacctctatccctgtagggaatgcttgttcaaacttcttcctccaacccagagggacatggaaaattcacaaagccaagactatggctgcaggtctaaaaacaggccaaggactcagcattcttcctcccactgagacaatgcccctcaccacctcaggggaccagcccgaatttggggcaaccttccttcatgaatgaggagaaaagcttgaaccaagacccatggagattgaaatgggcactagattcaaagacacgtacttgtaggaggctcatctggaccaggttcattgtaaccttgaaacaaagaagtcacacgtaagaggaggtggtggaaccgtcccagatactccatgcctttgtccatatggggcccctgcctggatgcctttccctttgtgtatctagagattatggatacatttatgtatcatctaatatttgacttaaatgtgttcaccactagaaagaatttcctgatatttcaattagcactgacccttccctactcacgtctccagcatgcctccaatgagaggctctcactacctttgtgttcacaagtctatcctcctatccatccataacccccgcctccccttccaggcctcctccaatctattcctccacccaatgaatgtttattaagggcttagtatgtgcaaggctccctttacatttggggaatatagggtagaacaaaacagtctccgcccccctggagattacattaggacaggatgcacatgtaacctatctctgttcctggggcgaggcacattgtggcctggttaatagtagctgcttggtaaatctaaatgaaggaacaaaatgaagcacataagctgtgcagtttacaagggggaacagctccctgcaatagccaagttgaagggactggatgttaactgagatcatcaagacccaacccgcacctgtgtgtttatcacagcactattcacaatagcagagatgtggaatcaacctatatgtccatcagcagatgaatccataaagaaagtgtggtatatatgcacaatggaacactattcagccataaagagaaataaaaccatgctgctgaggttgcagataaaaaggagtgtttatacactgttggtgggagtgtaaattagttcatccactgtagaaagcagcaggatgattcctcaaagagctaaaaacagaactaccgtctgacccagcaatctcatcactgcatatatgcccaaaggcatataaatttttctatcataaagacacctgttcactgaagcactattcacaatagcaaagacatggaatctacttaaatgcccatcaaggatagactggataaagaaaatgaggaacatatacaccatggaatactatgcagctataaaaaagaatgagatcatgtccgttgcaggaacatggttggagctggaggtcattatccttaccaaactaatgcaggaacagaaaaccaaatactgcctcttctcacttataagtgggagctaaatgatgagaacacatggacacatagaggggaacaacacacactggggcctgcctgaggttggagggtggcgggtggcgggtggagggtgggaggagggagaggatcagaaaaaataactaatgggtactaggcttaatacttgggtggtgatgaaataatctgtacaacaaacccctgtgacatgagtttaaccatatagaaaatctgcacgtgtatgtctgaacttaaaagttagaaaaaaagaatgaatccatgtcttttgcagcaacatggatgaaactgaagttaccttaagtgaaacaagtcagacacagacagacaaatatcacatgttctcaatcataagtgggagctaaacaatgtgtagacaagaactcagagaggggaatgatagataaagggggcttggaagggtgagggggtaggagcaaggtggatgatgagaaaggactaaatggatacaatgtatgttattggagtggtggatactctgaaagctctgacttcactactgtgccatctatgcatgtaacaaaattgcacttgtaccccataactgtatacatacaacgatgatcatgaggaggatagtaataataataataaagaacatcaagacccagactagccaaaaactcgctgtgggcatgggcaagtcccttcccttctctgtgcctcagtttccctctttgctaaaataagagtaatgaaagcccaggatgtctctccacatcccggtacctacctaaaggtacctcatataagtgatatggggtgcccacctcatggggtcatgatgataagcactgttcttgggttggcggtggaggggatgaaaggcgagctattttgtcaattctccacggtcatgctttgcctctcagaaccccatttaggggatgccttcttaaatgctatcttatcctgagttctagaccaatgctgaggcccagtgtgcctgaagattagatcccatagatcttcctggtatagggggcctcaggtaggagagaagcccatccctcgtcaatggtgagaagaaagcagggaggggaaattgttttgttttgttttgagacagagtcttgctctgtcaccaggctggagtgcaatggcacaattttggctcactgcaacctctgccttctgggttcaagcgattctcctgcctcagcctcccgagtaggtgggactacaggcgtgcgccaccacacccagctaatttttgtatttttagtagagacagggtttcactatgttgtccagggtggtctcaatctcttgaccttgtgatccgcccgccttggcctcccaaagtgctgggattacaggtgtgagccactgctcacagccggaaatgtgttttttgtcccccaagtgcccccaccaggaagactcttctgtgagttaaacatgtggagtggatcatagcaccgaatgctgacaagtggagttcatatcctggttccaccactgtcaaggtaaattgcttagcctgtctaagcctcagtttcttcatctgtaaaatgggattaatcaaagtccaaccttgcattgtggttatgggagggccagtggtaatgccaagacttgaaccccaagtctttccctagagaaccggcaaacagacaccctcctggactgcagtgggggctggggggtggggcagggagatggggctgatagctgctcaccgttaaggtagaggctgtctttgtccagagagtaggggcccagccgggtgatgccatgggtctgctggctcagctcatggaacacctgcttgataggcagacctgggccgctgaggggctgcaggtaggtgcagaggaggtccacccgtgtctcagcaccgttcttcacagacctgaggagggagaggtgcagctttgggggatgaaggccacctagcacctctccacttgtggtcactgcacaactcacagtccatattttggtctcattgacagtttgcactttctccacctgaccttatctatcatctcaggatctttgcaattgctgttacttttgtctggaagcttctccccatttctccttacctggataacttcctggtcatcctccaggtctcagcttagaggactccctcctcctcctcctcctcctcttcctcctcctcttcctcctcctcttcctcctcctatcttcctaggcaaggtcaggagcctcctctgggtcccacaatcctccactcttcccctgtcactgccctggtcaccctctatgtaatcataaattatttgttcctgttcctaccagaacatggtctccacgaaggaggaaatgaaccagtttagcttactcttattatattgaagccccagaacccagcaccccttgacaactccctgcaaaaatcaaagtcctaatgaatggagaaacacaatacagcatttacatacaagtggaaaaggaagggaattctgacacatgctacaacatggatgaactttgaggacattatgcttggtgaaataagccagccatacagtataaaccaggacatataccatatgattcctccattcataggaggtcctcagaatcatcagattcacagagacagaaagtagaatggtgggtgccagaggcttgaggagggggatgaggaatgagtgtttcatggggatggagtttcagtttgggaagatgagaaagttctggagatggatgatagtggtgatggttgcacaataatgtgaatgtgcttgatgccactgaacgggaaatatagctaaaatgatcaatttaatgtgatgtgtatgttaccacaatatagaaaaaaaaaatccaagccaggtgcagtggctcacacctataatcccagcactttgggaggccgaggcggtcggatcacctgaggtcgggagttcgagaccagcctgaccaacatggagaagccccatttctactaaaaatacaaaattagccaggtgtggtggcacatgcctgtaaccccagctactcgggaggctgaggcagaggaatcgtttgaacccaggaggcggaggttgtggtgagccgagatcatgcctgggcaacaagaacaaagctgtcttaaaaaaaaaaatccaagtcctccaaggcccttcaaacttgctgatgtcttgagtctcatcctttctctcttttcttcttgctctctctctgctccagccacactggcctctttgctgttcatagaacatgccaagctcatttgcacctcaagaccttttctcatgctgttctccctgcctggaacagttttcatggccatttgggacacagcccaagattcatcctgggtaaagttgctctacccatcacttgctatttatttatgtttcatatcactttactccatttgaagccattttacttagatatttatgttcctgtttagcatctgttcttctccactgggtgagggcagggacagcatctgtcttatcactctagtacccagcacctgcctcagaggagcggtgccatgggcatcagttgactaaaaatataaatggagaagtaaatagtaaataccaagagagtgcaaactgacccaaagaagtcaagttggcaaggatgcaagaaaaggaactcttatacatggttggtgggaatggtagaggagtggtgttatgggcatgggttgagtaaaaatataaatggagaagtatctagtaaataccatgagagtgcaaaccaacccagaaaactcaagttggcaaggatgcactgaaaggaaacctttttttttttttttttttttgagatggagtctcgctctgtcgcctaggttgaagtgtgcagtggtgcgatctcagctcactgcaagccccgccttcagggttcatgccattctcctgcctcagcctctccagtagctgggactacaggcacccgccaccacgcccggctaattttttgcatttttagtagagacggggtttcaccatgttagccagggtggtctcgatctcctgacctcatgatccacccacctgggcctcgcaaagtgctgggattacaggcataagccaccatgcccggcctaggaaactcttatacactgttggtgggaatgtaaattagtacaacctcaaatgaaaaacagtatggagatttctcaaaaaacaaaaaaaaaaaatcagaactaccatttgacccagcaatcccactgttggggatctacccaatggaaaagtattagaaataaatagtggtgatggctgtatgacattgtgaatataatcaatgtcactgaattgtacatttaaaaatggttaaaatggcagattttatgttacatgtatttttgccacaatataaaaaaaatgtgatcttaaatagatgcagaaaaggaccctctgagaatagctcaacccatatatatctaaaagaaatgaggccatgtgtggtggttcatgcctgtaaaatcccagcacttcaggaggctgaggcaggtggatcacttgaggccaggaatttgagaccagcctggccaacatggcaaaaccccgtctctactaaaaatgcaaaaaaatttagcctggtgtggtgttgggcgcctgtaatccttgctacctgggaggctgaggcacgagaatcgcttgaacccgggaggcacaggttgtggtgagtgaagattgcaccactgcacttcagcctgggcagcaagagcaaaactccctgggaggttgaggcacgagaatcgcttgaactcaggaggcagagtttgcagtgagccaagattgcaccactgtactccagcttgagcgacagagtcagactctgtctcagaaaaaaaaaaaagagaagaaagaaagaaatgaaaccagtatcttaaagagatatctgcactcctatgttcattgcagcactattcaaaatagccaagatatggaaacaagctaaatgaccttcaatggatgaatgggtaaagaaaatgtggcatacacatatacaatgaaatatataagaaagatgaaaatcctgccacttgggataacatagatggagctggaggacattaggctaagtgaaataagccaggcacagaaagacaaataccgcataatctaacttataggtggaatctaaaattgtcagactcatagaagcagagagtaggatggtggttgccaggggctgggaggaggagcaaatggggtgatgctggtcaaagggtacaaacatgataactatgtagagataatagatatattaattagctgaaatgtggccatgatttaacaatgtataccaaaatatcaagttgtacactttaaatgcaagcaatttttatatgtcaaaaatcaaactgtcatgaataaataaaaaagttattaataccagtcagaataactattactaaaaagacaaaaaccaaccaaccaaccaaacaaacaacaaacaaccagatgctggcaagaataaaagaaaagggaactcttatacactgttggtgggaatccaaattagtacaatctatggaaaatggtatgaggatttctcaaagaacaaaaatgtagaactaccatttgacccagcaatcccactattggggatctacccaataaaagaaatcgttatatcaaaaaaaaagaaagaaaaaaagaaatcattatataaaaaagacacctgcacgtgtatgtttattgcagcactattcacagcaaaggtatggacccaacctaagtgtccatcagtagaagactggataaagaaaatgtggtatatatatataccacgaaatactattcagccataaaaagagtgaaatcatgtattttgcagcaacatggatggaatgggagtccattatcttaagtgaaactcagaaatagtcaaataccgcatgctctcacttataagtgggagccaatggactccatgtccattagctcatggtggaataccatacgttctcacttatacgtgagagcatggacctggagtgtggaataatagacactggatactcagaaaggtgggagagtgggagaagggtggggaacctcacttaataagtacaatgtacactattcgggtgatacaccagaagctactgtctggaagtctactgtctgcagacttcactatggaatatatgcatgtaacaaaaactgcatttgcactccttaaattcatttaaaaaaaaagaatggggccagatatggtggctcacgcctgtaatcccagcactttgggaggctgaggagggtggatcacctgaagtcaggagttcaagaccagcctgatcaacatggagacaccccatctctactaaaaatacaaaacaattagccaggcatggtggtgcctgcctgtaatcccagctactggggaggctgaggcaggataatcacttgaacccgggaggcagaggttgcagtgagccaagatcgtgccattgcactctagcctgggcaacgagagcgaaacttcatctcaaaaaaaaaaaaaggaaagataaaaagatttaaaaaaatatgtagcccaccccaacccaagagggacctcccagtcagaactctaagttcttggtggtgcgctgtgggtgggggagtttctcaccttagtgcgatgaccctgcagcctgtgtaccgtgcacccaggctgctcctctggaacaaaggactgagctgcagagggagaagggagcttgggttggtcagaggcaggcaggcaacagccctaggatgggcatggcagggctgcagcgggaggcaggcctctcaccaggtgctgcatgacgttgtctgtgatgttgaacttgagggagccgggttggcccatgtccgccatgtagcgcaggttgttgatggtgaagttcagtgtgaatggctcctcgctgaccaccccggctagggcagggggaagagagagagagatgaagctcttggggaggatgatgggtgggtggggggtggtgtgggacagggtgggggcagtgtgttctaaggaccctgtgtccgcctcttaataaacccaacggtgacttttaatggagacaactccagcagccagtaagggtgtgcttaatgatttgggatgtccagatggggtccttctacccaaatgcaggaagggaagattctgtaaaaagtaccaatggttctgatctttcccagggtaaaggctgcatattaccacactgatgcggaagtcatgactctagacatttttaaaaaatttattctctctctctctcttcctctctccccatcgatccttctctgcctttctcccatttctctctctctcctgcactcacaaccaggtatgctaatcttctatgcattggttaacatggccaacaatctttgcagccataaccaacctctcagcacttcagtttactcatctgtaaaatgagatgacaatggttcacaatgatgtttcctgcctcaaccgttgttatgaagcttaaacaagttaatcattgtaaatcatgtaagcactgctgggcacacaggtcaatatggtgtacatgtttattatataaaatatatcagcaaatgctttctaatcactccctgtgtgtggaactttatgaaagtatgagttaaggtttttttttttgttttggtttggttttgttttttgtttttgtttttttgttttgtttttgtttgagacagagtctcactttgtcgcccaggctagagtgcagtggtgtgatcttggctcactgcaagctctgcctcccaggttttatgccattctcctgcctcagcctcctgagtagctgggaccacaggcatgcaccaccacacctgactaaattttttttgtatttttagtagagacagggtttcaccgtgttagccaggatggtcttgatctcctgacctcatgatccacccgcctcggcctcccaaagtgctgggattacaggcgtgaaccacagtgtccagccaagctaaggtttaagacaaatctctagaagaaaagtttacttctccttctctccctgcctttcttcttttcaccactcttgaacttccttctgttcattcttccttctctctttccatcctttcttcttcccttccatctttcattctattaatgcatcctttctttcttgctggcttccttcctttcattgtaccttctaacatctgtctatccttcctcttccttctctcacttctttccttcctttcacccatccatccatttatccatccatccatccatccatccattcacttatccatccatctatccatccatccacctacccacccatctgtccatccatccatccatccacctacccatttatccatccatccatctatccacccacccatctgttcatccatctgtccatccatccattcatcccttcacccactcacccactgatccattcatccatccatcatcaatctttcctttcttacacctctcttttcttccttccatctacttatccatctttcctcctccttttttctttcatccatttttttctttcttcaatccactcatccatcctctctcccttcctccttccatttatcacttcttctttccatctgtcacttcttccttccatctatccaccttgccttccttccatatatacagtattggtcctacaccgctccaggaacattggaaggggagcaggggggcggggtacagaaatactctggcccttccatagccccgcccaccattgtcccaccaatgcctcctattggctgaacctaacaggaagctagttagcatgggagcctgggaaatgtagttttcatgagtcagacgtctatcccacagagcacgggaaggctggaggaggttggagaatggatccgaggacaaaaacaaaacaaaacaaaacaaaacaaaacaaaaacccatatgtggtataatagagaaagcccataagaagtcacattcctataaaagagaagcagacaacagaatataaacaaatgagttcaaaaaagtgggagaagtattgtgaaggattaacagaaaaaaaaaaccccaggatctcatttggaagtaggagtgagacaaattcgtataagaaattgacttttccttcacagtcagtagagtaaacagacaacccacagagtgggagaaaatcttcacaatctatatatccaacaaaggactaatatctagaatctacaacgaactcaaacaaattggcaagaaaaaaacaatcccatcaaaaagtgggctaaggacataaatagacagttgttgaaagaatatatacaaatggctaatgaacatatgaaaaaaatgttcaacatcactaatgaccagggaaatcaaaaccataaggtgataccaccttacttctgcaagaattgccacaatcaaaacatcaaaaaataacagatgtgtgactctgggggccaagatggtcgactataagcagcagcgctcagaggctcacattgaaaaaaactgtaataagtgtgtgatccttcctggcaaccaaaatgtccaggttccctcatcaaaattgactagaaggctggcagtgacccacagagagaaggaagagcagtgtggtgtggtggcccacctgagagacacacggggaaggggaaccccctccttccagccaagggaggtggtgagtgagcgggctacccaagagggggaaactgtgctttttccacggaactgtgcaactcacagattggaagatctcactcgcgaacccatgccactgggacctagtgtcccaaccccagaacacgcagattcttacagctggaatctgcctaagcctacggaactccccgggggaggggcgaccagcactggctgcggctgcctgctaagtcttttttgttccttggggaaggggcgacagccagcactggactcacaactgcctaacacgctaagctccctgggcgggggaagggcggcacccctttcaatagctccaggctgtacttttcccctgctagagccgggtaggctggacggcttggtcccaagacttgtccccacagcccaacacaccggctgtggcagtctgcagccagagtgcctcttcagggctaaccctgacccatccttcctcagtgggcagagcttccttgcaggatctccaaagactccagccagaggctcagagacagaatttggactccctgggcttgggcccctagtgggagggatggctgtagtctctgtggaccagcagacttagcctctcctctggtagttctgaggaatccaagcagcccagacatgtggtttccccccagtgaagaaccccctctccaccaggggacaaagtgcttcattaaatgggtcctgctctccatgccagtcaactgggcgaaaccctccaacaatagttgtcagacaccctacacaggagcgatcctactggcatcaggttggtgtccctcgaggtcagaggtcccagaagaagcaggcacctatgttcgctgctctccaagcctccttgagtgacacctccagacatgggagcgaatcagatgaatagggcctgaagtgaacccctagcaaactgcagcagccctacagaagagggacctgactattgaaagaaaaacaagcagaaagtgacaataacatcatcatcatcaacaacaacaaccaaaagacccccataaaaaccccatccaaggatcagcagcctcaaagcctgaaactaaaactcctgaagatgggaaataatcaacaaaaaaatgctgaaaacccaaaaggccagagtgcctcttttcctccaaatgaccgcaacatctctccattaagggtgcagaactggatggaggatcagatggatgaattgacagaagtaggcttcagaagatgggcaataaaaaagtacgatgagctaaaggagcatgttctaatgcaatgcaaagctaagcaccttgatgaaaggttaaaggaattgctaactagaataaccagtttagagaggaacataaaccaaccgatggagctgaaaaacacagcacaaaaacttcgtgaagcatacataagtatcaacagccaaatcgaccaagtggaagaaaggatatcagcaatgaccaagctgagcctgagctgagccttctaggaaaaccaaagagccaactacacatcatcaaggaacctaactctcttgaattctgtcccataatcctgagtcagctccaattgaattggtagcgactgaattttttttttttggtaaccattctgaagctgttttgaactgagagaaaatgaatgctattatcaattggtgatgtctgccatgaatgctgcaatcaattaatgatgtctgtcatggatgagggagtggagcagatgccatatagttttccagtgtaaactctggcagacactaaagttgaaccaaggcagaagaggaaagtttccatacattataagaaagcatacttcattccttccttccctgggaaaatccatattttcctgtagatctaaatctgtcgatctaccatgtacaaggtcctgaagcagatactagggaagcacaagggagtaagacacagttgctccaatcagcaggtttatgcactattggggtgactggatataaacacaatgttcaaagcagagaaactgtgtttgcaattgacttaaaaaatatgcaataggacttaaagtgagtgacaaaataaaaggttcccatgattcttctgcctataataattcaagattttttttagaaatcatattaaatagtactagttaaacactgagcatagcactttggtgcatattcagtagccaataagttcatatattatccattaactttgttatcaccaccaccatcataatcatcaccatccctgtcaccatcaccatcattattgtcataatcaccaccatcattaccaacatcaccatcatcatcattaccatcatcaccaccaccatcaccattgtcatcatggtcataatcaccatcaacatcatcatcattgccaccatcagtatcatcataaaaatagctctctgagaggagagattattaattgtttcatgatccatgccatatccccaggatttggcagagccccagggcttgtcacaatgctcaataaagtttgttggttggctcatcatcactagatttataaagaatttccatctttatttgactgaataatggaagagatgtttacactcatcagccatgctctaacagaggtgccattggctggtacttattcaagggaccagtagaaggggtggatccccagagtttcccaggtccactgtggtagtcccaagagctacagagaaaccctcttcaggggaagcatccaagcctctcatggcagaaaggtcagcaaataaaactatttacaggccttgctgcatatcgggcctgagctgggtctctctctggagctggccagaagggaaagggaataacttgtgccctcccagccccttcctttatgaagaggacataggggcataggaagacaggacagctcctgccctgcttggtgtataattggggctactggagcatcggttgaatactcactgctggtggtgggtacagagctccgatgggtgaaacctgcacagagaaggagggaggagagtgggtaagggttaagggagaggtggggaatcaaataggggtcacagataccctagtggaatggaagaagtttcaaggaacaggggcctttgaagattctctatcagtaccctcagatcagggaagaaggtactgaggatgaactcagtccaagatgaagaaactatgaagttcagacatcagtcatcacatacagacaacatagccaagacgtcaatggccagtcagggagtgtgacctcaagtcagagagtaagaagctgtccagcaaagaggaagaatctccaaccacatcacagccgctcaccattgacatagagactgtccctgtccagtgtgtaggggcccagctcagtgatgctgtgggtcagctggctcagctccaaatacagctgctctctgtccagcccagggcctgtggggtcagggcggtgggtgcagatggcatccactccggtggcttccccatctttctctggcctagggagggcagataagggggatgacattaaatagattgcctatggggaggcatcctgagattcctgggggcaggacaggaaggggacagaggaaatgagaatcctggtagacaggtgagaagccatactaagattctctgaatgcaccaacttccaggcagcctgggaatgtgagtagagtcaggaatacaagaattttataaaattgcattctcatggtatggggacaggagagcccagacttgagaaatattaagagctggaattggggatgaaagcaagtggatgggggatgtttatcttgagagaaaccttggaagagaatttaacacctgaaggagagggaggtagggagaagtaagaaattcagaaggatgaccaaagtagaagcctgatctggctgatgggccctgcaaattctctcgattgatgggggaggtggtaggatcagcagatatgttcatcctggagccaccaacgcctgaattccacttgtgctgaggacttccatagggagggaaggaagaaagctgatgaaactccttgggcctgggaacacttggggtagccagactggttattctcagttctcacctgagcaaggtcagcctgcagccagagtacagagggccaacactggtgttcttgaacaagggccttagctgtggaggaggaagagggaggtgagtaagatggctgaggacatagaagtgaggaagatgtaaggtggaaggggctgtaatcagggggcggggctatctctcaggtgaggggaggtgggtgagatcttcttccatgccttggaatgggtgacgtaggtggaacaagacaaggtgggcagggcagagtgaggtgggcagggctctcaccaggccctgaaggaccctctctgtagtgttgaacttcctggagccaggccacatgttctcctcataccgcaggttagtgatggtgaagttgagggtgaatagtatcaggagatggctggcagctgtagtggaggtgggaaataaacactatgttcaaaagtagagaacatttaagagtttgtaatagatttatttctaaacatatgcaaccagatttaaagagagtgataaaatagaaggttttcatgcctcccttgactataacgatcaaagtttttcatagagcatgctaaataataatagttagatgctgagcataacctttggtgatgttctgtgttccataatactagacactatctattacctttgttatcaccaccatcatcatcaccaacactgtgaccatcattttcattattgtcatcaccaccaccatcaggacaaaaaccatgatcttcataatccctatcatctccaccaccatcaccatcatcatccacatcatcacctgcaccatcaccaccaggaacatggtcaccaacaccatcactgtttcatccttaccatcatgacaatcaccaccatcatcctcattatcatcatgatcaccaccatcaccaccacaaccacaaccatgacggtccacatcaccaccactagtaccgtgatcaccaacaccatcatcacatcatccttaaccatcataaccaccaccactatcatcatcatcctcattgtcaatatcaccaccacattgtcaatcaccaccacaaccaccaccatcaccaccaccactgtcatccttcccataatcaccaccaccactatcatcatcatcatcacatcatcattactgtcaaaaccactaccatcatcaatatcatcatcatcatcttcataatcaccatcatcatcacatcatggtcataagcatcaccatcattattgtaatcatctccagcaacatcatcatcaccactatcccacatcatcctcaaaataaaagaagctctctgagggcagagatttttacctcttttgtgttccctgccttatctctagggcctggcagagagtgggtactcaaagaagtttgttgggtgactcatcatcagtaaatttgctatgatttttaatcttatttgagtgaaaaggacagagatgttgacactcatcatgcatactctaatagaggtgccattgactggtacttacctgaagggccaaatatcgaggctggagtcttagatgctcccagatacactgtgggggtcccaggagctgaggagaagcccgcattggttaaagcagcataagctctttcatggcagaaatgccagcagataggaatatttctgcatgtggggcttgagattagtgtctctctggagctgggccagagggaaagggaatcacttgtgccctctcagatctttccctcatgaagaagatataggggcataggagaagggggtcagctcctgtcctgcttggagtaggactggggttactggaacattagtagaatactcactgctggtggtggacacagagctccgatgagtgaaacctgcatagagagggagggaggagagtgggaaagggttaagggaaaggtgggggaccaaaaggggtcagtgctaccatggtgcaattgaaggagtttcagggaacatgggctttgaggattctatacaagtacactcagatcagggaagaaggtcctgaggatgaaggtctccagtacaagatgaagaagaaacggtgaagttcatatcaatcatcaaatacagacaacatggccaagaccagtggccaggcagggagagtgacctcaagacagagagtagaggcctgctcagcaaggaagaagaaactccaaccacatcacaattgctcaccattgacaaagaggctgtcgttgtccagggcataggggcccagctcagtgatattgtgggtcagctggctcagctcccaatacagctgctctctgtccagcctagggcttttggggtcagggtggtgggtgcagatggcatccactccagtggctgtcccatccttttcaggcctggagagggcaggtgaggggaataataataaagttttgtctagggaggagtcccaagattgctgagggaaggacaagaaggggccacaggaaatgagaagcctggtacacagatgagaagccacacttagattctctgagtgcactgactactgtccagcttgggacggtgagcatacttgtggataaaagaatttttctaacatttcagtgtggttcttgcattctcatggcatggggacaggacagcctagacttgagacaggtgacaagctggaattgggaattaaacaagtgaatgaggcacatttgtcttgagagaaatcttagttagagaatttaacacctaagggcaagggaggtggggagaaaagagggaattcagagggatggccagggtggaagtccaatcctgctgatggaccctgtggaaactctcagtcaatttgggtgtgatggcagggggcagtggtaatattgggagacaggttagtcttggagccactgttccttgagttccatctttgatcagaataaccacagagagggcaagaaaaaagaagtccacactcatggagactgggaacaattggggcagacaggttggcaattctaaggtctcacctgagcaaagtcagtctgcagccagagtacagagggccaacactggtgctcttgaacagggacctgagctgtgggagagggagagggaggtgagtaggatggctgagggggtagcgtcaggggactagtcattggggctggcaccagtaggcgggcctggcatcagtggatgggggctcacggctctgggtgtgagaggaggtgggtgagatcttcttccatgccctgtcatgagtgagacaggtggaactagacaaggtgaactgggcagagtgagatgggcggggctcttaccaggccctgaaggaccctctccgtggtgttgaacttcctggagccagggtgctgcatgttctcctcataccgcaggttggtgatggtgaagttgagagtgaatagcaccaggagagggctggcagctgtcgtggaggtgggaaagaaacaacatgttcaaaagtggagaactttatatatttccaaaaggcctacttctaaacatatgcaacaggatttaaagagagaataatataaaaagtttccatgcgtcccttgactataacaacagaagtttctaacaaagcctactaaataatagtagtagttagcatacctcttggtgcatattcagagttctataatactaaatattatctgttacctttattattaccattgtcatcatcaatgtcaccaacactgtgaccctcactattattgtcatcaccaccagcatcagcaccacccacatcagcaccaaaatcatgaccaacagtgtggtagcatccccactaccatcatcatcatcatcaccaccaccacaatcatcatcatttgcatcatgatcaccagcaccatgattaccaacaccattgtcgtatcatcattattctcatcaccacaaccaccatcacaaccatcatcattataatcatcattatcttcattgtaaccatcacaatcactattgtcaatcactaccacaaccgccaccatccttaccaccatcattcttcccataatcacccccacaactgtcctgatcatcatcacatgattaccatcataaccaccaccactaccatcatcatcattattctcattgtcaacatcgtcattactattgtcaatcactaccaagactaccaccatcaccaacaccactatcatccttcccataatcaccaccaccattgtaatcatcatcacagcatcaccatcataacccctgccaccaccatcatcatcatcaccaccaccatcttcataattatcatccttatcaccatcatcatcactagcatcaccattcttattgtcatcatctccagtaacttcaccaccaccaactcccatcaccctcacaataaaataagctttcttgcagcagatatttttaactgttttgtgtccccttccttatccctagagccctgcagaaactaggcactcaattaagtttgctggatgactcctcatccgtagattcactaggattttttatctttatttaagtgaaaatggcagagatgttgacagtcatcaggcatgctctaacagagatgcgattgatttgtacttacccgagggaccaggtttagaaactggagtcccagatgttcccaggtccactgtgggggtcccaggaactgaggagaaggcctcattagtgaaagtgttgaaccctctcatggcagaaatgccagcaggtaggagtatttatggaccttgctgcatgtggggcttgagctgggtctctctctgaagagacttgggccagaagggaaagggagtaacttgtgctgtcccagctcctttgctcatagaggacataggggcatgtgaggaggggtcagttcttgccctgcatgatgtaggatcaggagcactggaaatcagtggatactcactgctagtggtgggcacagagctccgctgtgtgaaacctgcatagagagggagggaagagggtgggtaagggttaagggagtggtggggaactatataggggtcagggtaccctggtgcaatggaaggaatttcccagaacacgaaccattgaagattctctatcagcaccctcagatccagaaagcagatcctgaggatgaactcagtccaagatgaaatagaaaccatgaagttccaacctcagccatcacatacagacaacatggatgagcattcaatagccaggcagggagcgtgacctcaaggcagagagtagaggctgcccagcaaggaggaagagactccaaccacatcacaactactcaccattgacatagagactgtccctgtccagggtgtaggggcccagctcagtgatgctgtgggtcagctggctcagctcccagtatagctgctctctgtccagtccagggcttttgggatcagggcggtaggtgcagatggcatccactttggtggctgccccatccttcttgggcctggggagggcaagattggggaaagacaatacacggattgcctagggaggggttctgagatcccacagggcaggacaggagggggccagaggaaatgagaagcctggtagagaagtgagaagccatacttccattctctgagtgcactgactcttagcaactatgagcagaatcatggatgcaaggatttttataaaattgcaaagtggaaactgcattcttgtagcatggggtaaggagaactcatacttgagacaggtgaagagctaggtttggggatgaaagcaagtggacgaggcatgtttttcttgggagaaatcctgggaacagaattgaaccacttgtggaaaggcaggtaggggaaaggagggaattcagagggatgaccaaggtagaagctcagtcctgctgatgggctctgcatctctcagttgaggtgggaggtggtgggaacaggaagcacattggtcttagagccactgcctcctggattccacctggctgcggacatctccagggagtgcagaagggaagcaggtcaaactgctcagatcagtcagactggctgttctcagttctcacctgagcaaggtcagtctgcagccagagtacagagggccaacactggtgttcttgaacacaggcctgagctgtggaggagggagagggaggtgagtgggaggactgaagtcataggggtgtggtagaagggaggtgggcagggctggcaacagttggtggggctggcatcagtggttggggtatgcatatctgggggcaagatgaggtagatgagatcttccatgctctgcaataggtgaggtgggcaggactaaacatggtgagtggggtagaatgaggtatgtggggctcttaccagaccctgaaggactctctccgtggtgttaaactttctagagccagggtgatgcatgttctcctcataccgcaggttagtgatggtgaagttaattgtgaatagcaccaggagagggctggcggctatagtgaagatgggaaataaacagtgttcaaaagtagactaacacttaagaatttgtgatagaattgtttctaaacatatgcaacatgatttaaagtgacaaaataaaaggttttcacgcctcccttcactgtaatggtacatagttctcatagagcatactaaataatagtagttagatgctaagcacagctcttggtgcatattcagtattccatactactagacattatctactacctttgccaacaccacgatcatcatcaacatcagcaacactgtgaccatcgctatcattattgtcatcaccaccagcatcagcaccaaaaccatgaccatcataatccctatgatccccacccatcatcatcattacaccaccagcaccacaaccatcatcatccatataatcaccactagcacatggtcactaacaccattatcatatcattcttactatcataaccaccatcaccaccaacatcattatcatcatcaccaccatcattatcctcattgtcaacatcatgatcacattgtcaattgccatcagaaccatcacatcaccaccaccactatcatccttcccataatcatcaccaccactatcatcatcatcaccatcaaaaccactaccaccatcatcatcatcatcaccatcatcagcaacaccatcattgttgtcatcatgtccatcatccctatcattatcatcatcatcacaacaatataaccttcctgaggatagagatttttatttcttttgtgttccctgccttatccctagggccccgaagaagccagacgctcaacaaaatttgtcggttgacttgtcatcactagattcactaggacttttcatttttatttgagtgaaaatggtggagttgtaggccaggtgcggtggctcacgcctgtaatcccagcactttggggggccaaggcagacagatcacgaggtcaggagttcgagatcagtttgaccaatatggtgaagctccacctctactaaaaatataaaaattagctgggcatggtggcatgcacctgtaatcccagctactcaggaggtggaggcaggagaatcgcttgaacctaggaggcagaggttgcagtgggctgagatcacgccattgcattctagcctgggtgacagagcaagactatgtctcaaaaaagaaaaaaaagaaagaaaagaaaatggcagagatgttgacactcctcaggcatgctgtaatagagatgacactgaatagtactcactcatgggtccagacagggaggctggagttctcgaggttgccaggtgcattgtggaggtatcaggagctgaggagaaggtttgctgtattagtgaaagcagcaaaccctctcatggcagaaacaccagcaggtaggagtatttatggcccttgctgcatgtggggcagtatctccatctggagctgggccagagggaaaggggaataacttgtgctctctcttccttccctcatgaagaggatataggggcatagaaggagaggtaagctcctgccctttatgatgtaggatcaggagcactggaacatcagttaatactcacttctggtggtcgtcatagagctctgatgggtgaaacctgcattgagatggagggacgagagtgggtaagtgttaagggagtggtggggtaccctggtgcaacagaaggaatttcccagaacacgggccattgaagattctctatcagcaccctcagatttagaaagcagatcctgagggtaaattcagtttgagatgaagaagaaaccacgaagttttgaccttagccaccacatacagacaacatggttgagccttcaatagccagacgggaagtgtgacctcaggccagagaatagaggctgtccagcaaggaggaagagactccaaccacatcaaagttgctcaccattgacatagagactgtgcctgtccagggtgtaggggcccagctcagtgatgccgtgggtcagctggctcagcttccagtacagccgctctctgtccagtccagggcttttggggtcaggacgatgggtgcagacagcatccactctggtggctgccccatccttctcaggcctagggagggcagatgaagcaaataacaatttaaaaattgcctcaggaggagttctgagatttcctggggccagacaggaaggggccagaggaaatgagaagcctgggaaagaggtaataagtcacatttagattctctgagtgtcccggctgccagccagcccaggactgtgaacagagtcatagatgcaagaactttttataaaattgcaaagtaaagcctgcattctcatggcatggagacaagagtactcagacatgagacagatgaagagctggaattggggatgaaagcaagtggatgaggcatgcttgtcttgtgagaaatcctggggacagaatttaacaactggaggaaagggaggtgggtggaaaggagggaattcagagggatgaccaaggtagaagcacaattctcctcatggactctgcagaatctcgcagttgattggggtggtgctgatggtatcaggagacagattagttttgaagccaatgcttcccgaattccatctgttgtgaggacattcacagggatggcaggaaaaaaaaaaacaatccaaactctttgcgactaggaacaattggggcagctaggctagctcttctaaagtctcacctgagcaaggtcagtctgcaaccagagtacagagagctgacactggtgttcttgaacaagggcataagctgtggaagagggagagggaggtgactaggagggctggggatatagtggtggggcacaagtgtggcgagtgcagctggcaccagtgggcagggcttgtgtctctaggggagatggatgagattttcttccatggccctggcatgggtgatgttgttgggaccaggtaacgtgggaggggcagagtaagttggacaggggtctcaccagaccctgaaggaccctctccgtggtgttgaacttcctggagccagggcgacgcatgtcctcctcatactgcaggttagtgatggtaaaattgagggtgaatggcagcaggacagggccagtggctgtagtaaaaggtgtggaaacaaacactattgtgtttgtttgtatttttaatctgttgcatatagttaaaaataagtctattgcaaactcctcaagtttctcgacttttgcaatagacttgaagagtttgcaataagtttatttttaatcatatgcaacagaatttaaaatgaatgacaaaattaaaggtttccatgcccttcttgatagaaattatttttttaaaaagcatattacataatatttgttagattctgagcccagcttttggtgcatattcagtgctgaaaaatatcagatattacctgttacctttgtcatcaccattatcatcatcatcatcatcatcatcaccattattgtcagcatcagcaccaagaccatcaccacaacgataatccccatcaatactaccacaaacatcattatcaccatagtcatatcatcattaccatcataatcatcatcactgtcattatctgaataatcatcatcacgatcattgtcatcataatcactatcgccatcactattgtcatcctcaccatcacgaatgtcacaatccacatcaacaccaccacaaacatcatcatcatcaccataatcacatcatcattagcatcataaccagcaacattactgtcatcatccaaacaaccatcatcatctttaccatcattgtcaccattgttatcatcaccactccaacatcatcaccacaatcaacacaaccgtcatcatcatcattattattatcattattgtcaaaatccccataattattgtcaattgtaatccccaccaccaccatcattcttcccatgattaccaccagcataatcatcattatccttaccatcaccaccaccaccaccaccactgcaatcatcatcaccgccacccccatcatcatcatcatcacaataatataagctcactgagggcagtgttttttctttttttgttccctgatgtatatccaggtcctgatacagaggcagtgctcaatgaactgggttggttgacctatggttactacatttactatgaatttccatctttagttgagtgaataatgacagagatgtttacactcatcaaccatgctctaacagagtataaacagagatgtttacactcatcaaccatgctccaaataccattgactggtatttacctgtggggccagggagggatgatggagtctcagaggtttccggctgtactgtgaaagtcccaggagctgaggagaagccctcaacagtgaaaggagcaagtgctctcatggaagtaatgccagcaggagggactattcatggggatttttgcctgtggggcttcagctgggattctgattagctggggcagtggggaaggggaataatttgtgtcctctatgttccttcccttatggaaaggacataagggcttatgaataggggtcagctcctgctaagtttgttgtaagattggggccatgggaacatcagtagaatactcactgctggtggtgggcacagagctccgctgggtgaaacctgcatagagagggagggaggagtgtggataagagtcaagggggaggtagggggtcaaaaaaaagtcagggctaccctggtggaatgaaaggagtttcatggaacaggggcctttggagattctctgtcagaatctgagtatcagggaagaagctactaaggatgaaatcagttcaagataaagaagaaatcatgaaattctgacatcaatcaccacatacagacgtgtcctagccttcagtgtccaagcagggcatgtgacctcaagtaagagagtagaggctgcccaggcaggagaaagagactctaatcacatcagagctgcttaccattgacatagagactgtccctatccagggtgtagggtcccagctcagtgatgctgtgggtcagctggctcagctcccagtatagctgctgtctgtctagcccagggattttggggtcagggcggtgggtgcagatggcgtccactctggtggctactccatccttctcaggcctggggagaggtggtgaggggaatggcaataaatgaattgcctaaggagaggtcttgagatggcagagtgtaggacaagaaggacagaggaagtaaaaagtctaatacagaggtgggaagcaatacttagattccctgagtgtactggactgcttgggactgtgagcatagttgtggatataacagttttcccaaaatggcagggtggatcctgcattcttaaagcatggaaacaggagagctcagacttgagatagctgaagagctggaattggggatgaaaacaagtggttgaggcatgtttgtcttgagagaaatcctggttacagagtttaacacctaaagtcaagggaggtggggggaaaacagggaattctgaggaatggccagggcagaagtccagtcctgttgatggactctggaatctctcagtcagtttggaagtgggggcgggggcactgctaataccaggagacaggttagtcctggagccagtttcctggattccatctttgataagaataatcacaaagaggacaggaaaaaagaagtccaaactcattgagactaggaataatcggggcagccacactggaaattctaaggtctcacctgagcaaggtcagtctgcagccagaatacagagggccaacactggtgctcttgaacaagggcttgagctgttggggagggagagggaggtgagtggcagggctgaagaagtagaggcacggcagaagtgaggtgggtggggctggctgtagttggtggagctgacatcagtaggttgtatggggcttttatctcttggggtgaggggaggtgggtgagatcttccatggccatataggtgacataggtgggactaggtaaggtggatagggcagagtgagataggtggggctcttaccagaccctgcagaacactctccgtgatgttgaacttcctggagccagggtgacccatgttctcctcatactgtaggttagtgatggtgaagttgagtgtgaatggcaccaggagagggccggtggctatagtgaaggtgggaaataaacactatgttcaaaagtagagaaaatttaagagtttgcaatagacttatttctaaacatatgcaacaggatttaaagtgagtgataaaacataatgttttcatgcctcctttgactattatgatagctgttcttgagagagcacattaaatagtagttagaggctgagcataggtcttggtgcatattcagtgttccatagtgccagatactatctagtgccgttgttaacaccaccttcattttcaacatcaccatgattgtctccatgagtattattatcatcaccaccatcagcaccaaccccaacaccaccaccaccatcatcattatcaccattaacaccacaaccatcatcatcccaatcatcacctccatcaccattatcatcatcaccatcatcactgtcaatatcaccatgattgccaccatcagtagtattattgtcatcatcaccaccaccatcatcatcatcatcatcacataaacagaagctcactgagggcagagatgtttttactggttttattttccttgctgtatccctagggtctggtacactgtaggtggccaattaatttttttggttcactcactatcactagacttattatgattttctatctttatttgaatgaaaatggcacagacgtttacatcaggcatgctctaacagagatgccattgactggtacttacttgtggggctggggacgggggatggagtccctgaggttccaaggtcaactgtggaagtccaaggagctgagaaaaagtcctcatcagtgaaagcaggaagcactctcatgacagaaatggcaagaggggagactatggggtccgctgcctgtgtggctagagatgggtcagtctttggagctggggcagagcagagcttgagtaactgctgccctcttatctcctttgctgaagaagaggacctatgggtttatgaggaggagtagctcctgttccgcttggtgtagaatcaggggcatgtggacatgagttgaatactcactgctggtggtgagcccagagctccgatgggtgaaacctgcatagggaaggaggcaggagagtgcgtaagggttaaggagacattggcaaccaaataggggtcaaggctaccctggtgcaaaggaatgaatttcatggtacggggcatttgaagatttcctatcagcatcctcatatcagcaaagaatgccctgagggaacacaatctacggtgataaagaaactatgaagtccagaacttagtcatcccatgtaaaacaagtgacagaattttcaattgccaggcaggaagtgtgacctctagttagagattagctgctgctcagcaaggaggaagagacttcaaccacatcacagccactcaccattgacgtagagactgttccggtccagggtgtaggggcccagctctttgatgccattggtcatctggctcagctgccagtacagctgctccctgtccagtccagggctttgagggttaaggtggtgggtgcagatggcatccactccagtggctgccccatccttctcagacctggggaaggtaggtggggagaatgacaatgaaaagattacctaggatgggtcttgagattgctgagagaaggacggcaaggaaccagaggatatgagaaacctgggaaagaggtgagaagccacacttagattctctgagtgcgcagactactggcttgttagagactgtgagcagagtcatgaatacaacagttttgataaaagtgcaaggtgaggctgggtatggtgtctcacgcctgtaatcccagcactttgggaggccgaggcaggtggatcacctgaggtcaggagttcaagaccagcctgaccaacatggagaaaccctgtctctactaaaaatacaaaattagccgggtgtggtggcccatgcctgtaatcccggctactcgggaggctgaggcaggagaatcgcttgaacctgggaggcagaggttgcagtgagccgagattgtgcgattgcactccagcctgggcaacaagagtgaaactctgtctcaaaaaaaaaaaaaagtgcaaagtgaattctgcattctcatggcatggggacaggagagcccagacttgaggccagtgaagagctggaaatgaggatgaaagcacgtggctgaggcatgattgtcttgagagaaatcctggggacagaatttaacacctaaatgaaagggaggggcagggaaaggagggaattcagagtgatgaccagggtaggggctcaattctgatgatggacaatgcagattctctctgttgaggtggagtgtgggggtgttactatcaggagacacactggtcctgaagccagtgactgctgaaacccacctttggtgaggatatctctaggaagtgcagcaaggaagcagtgcaaagccttttggagtgagaataattgggacagctaggctggctattctagcctcacctgagagagatcagtctgcagccagagtacagagggccgacactggagttcttgaacaagggaccaagctgtggaaaagggacagagagatgagtaggagggctaaggtccctgtgtgtgggtgcagaaataaggtgagtgaggcagggcctagtgggtgaggctagcttcagtgggcgtggctggcctcagtgggtgagtcttgcatctctgggggcaaggacgaagtgggtacattcttctcccattaccctggcttggatgttgtaggagggactgagtatcttggtcagggcagagtgaggagggcagggcactaaccagaccctgcaggaccctctctgtggtgttgaacttcctggagccagggtgacgcatgtcctccccatactgcagattggtgatggtaaagttgagggtgaacggcaccaggagaggaacagctgctgtagtgggagggggaaataaacactatgttcaaaggagagaaaataggagtttgcaatatagttatctttaaatataggcagtatttaattgactgacaaaataaatatttaccatgcatcccttgccttcaatgacagaatttattttttaaaggatattatataaaatagtagttagatgctgagcatagctcttggttcatattcagtgctcaatattctctgatgttacctgttatctttattattgccatcatcatcattgctatcattgtcacaatcacaatctttattatcaccaccatcataataatccccaccatgaccaccacaagcatcatcatcaccacactcaacacatcactattatcatcataaccccatgaccatctctggcatcatcctcaccaccatcaccagttattgtcatcaacatcaccagtttcatcatcatcatcataaatagcaccaccaccaccaccatcatcatcactaacatcataaccgtcactgacatcatcttcatatccatcatcatcatggtcggcaacatcaacaccattatcatcaacagcatcactatcatcatcatcatcatcatcatcaacagcaccaccaccatcatcaacagcattaccatcatgatcattaccatgatcatgatcatcatcatcatcaacaactagcaccaccaccactatcatcatcacatgaataaaaaagctcactgagggcagagacatttttattggttttgttttccttgctgtatcccttgggtctggtacacagtaggtggccaacaaatatttttggttcactcactattaccagatttactataattttacatctttatttgagtgaaaatggcagagatgttcacactcatcaggcatgctgtaatagagatgtcattgactggtacttacttgtggggctggggagggaggatggagtccctgaggtcccaaggtccactgtggaggtcccaggagctgaggaaaagtcctcatcagtgaaagcagaagcactctcatggcagaaatggccaaacaggggactattatgaggtctgctgcatgtgggcatgagctgggcctgtctttggagctggggtggaagggagcttcaataacttcagccttcccagctcctttgctcatgaggaggacttatgggtttatgaggaggggcagcttctgctgtgcttggtgtaggatcaggggcatgtggacttgagttgaatactcactgctggtgggggccacagagctccgatgggtgaaacctgcatagagaaggagggagaaaattgtgtaaggattaaggagatgtgggggatgcaataggggtcatggctatcctggtgccatgggacagggaccattaaaagtttcctatcggcatcctcacaacagagaagaatgccctgagggaatgcagttcacgatgacgaagaaaccatgaagtccagaacttagtcatcccatgtagagcacataacagaattttcaatggccaggcagagagtatgcccccaagccagagattagagtctgctcagcagggaggaagagactccaaccacatcacatctgttcaccattgacatagagactgttcctgtccagggtgtaggggcccagctctttgatgccatgggtcagctggctcagctcccagtacagctgctctctgttgagtccagggcttttggggtcaagacggtggctgcagatggcatccattccagtggctgccccattcttctcaggcctggggaaggaaggtgggaggaatgcaatcaaaagattaactaggaagggttttgagattgctgagggaaggactgcaaggaaccagaggaaatgagaagtctgggaaagaggtgagaaatcacacttagattctctgaatgcaccgactactggcttgctttgaactgcaagcagggtaatgaatacaagaatttttatgaaagtgcaaagtggcttggcacagtgcctcatgtctgtaatcccagcactttgggaggccaaggcgggcagatcacttgaggtcaggagttcaagactagcctggtcaacatggtgaaacccagtctctacaaaaaatacaaaaatttgctgagtatagtggtgggtgcctgtaatcccagctacttgggaggctgaggcaggagaatcacttgaacatggaaggcggaggttgcactgagctgagaccagcctggtgtgcagtaagactatgtttcaacaatgaaataataaaataaaataaaataaaataaaataaaataaaataaaataaaataaaataaaataaaataaaataaaaaagtgcaagttaaaacctgcattctcatggcatggggacagagacaccagacgtgagaccaatgaagagctggaaatgggcatgaaagcctgtggatgaggcacgatcatcttgagagaaatcctggggacagaatttaagacctaaaggaaagggaggtgcagggacaggagggaattcagagggatgatcagggtagaggctcaatcctgatgatgggccattcagattctccctgttgaggtggggtttgggggtgttactatcagaaaacacattggtcatgaagccagtgactcctgaattccacctttggtgaggatatccctaggaagtgcagcaaggaagcagtgcaaagtcgattggagtgagaacaagtggggcagccaagcttgatcttctaaggtctcacctgagcaaggtcagtctgcagccagagtacagaaggccgacactggtgttcttgaacatgggaccaagctgtggaggagggagaaggagatgagtaggagggctaagttgcgtgtgtgggtgtgtagggcagaagtcaggtgggcagaacaggcatcagtgagtggggctggtttcaatgggcatggcttgcatctcttggggcaagggtgaggtgggtatgatcttgttccatcacctggcatggatgatgtaggaggtactgactctctggggtggggcggagtgaggagggtggagcactaaccagaccctgcaggacccgctccgtggtgttgaacttcctggagcctgggtgatgcatgtcctcctcgtactgcaggttggtgatggtgaagttgagggtgaatggcaccaggagagggccagcagctgtagtggaggtgggaaacaaacactatgtccaaagtagagaaaataggagtttgcaatagacttatctttaaacatatgcagaatttaaattgagtgacaaaatatttaccatgcttcccttgcctaaaacaatacaatttatttttacaaaaatatattatataatagtatttagatgctgagcactcctcgtggtgcatattcagagctcaatattgtctgatgttatgtactatctttattgccatcatcatccttgctatcattgtcaccatcaccatcattattatgaccatcactgccatagtaatgcccatcacgaccaccacgaacattatcatcaccacattcaacacatcatcatcatcataaccccacaccatcactggcattatcctcatcaccatcattgtcattgtcatcaacataaccacgaccaacatcaatatcatcggtaccacggtcagcatcctaaacagcatcaccacagtcatcatcatcatcacacttaacacatcatcattatcatcataatcttcacgaccatcacggacaatatcctcaagtccatcaccatcatcatcagtaatatcaccaccgccatcatcaacagcatcaccatcatcaacagcatcaccatcatcaacagcatcaccatcatcaacagcatcccactcaacatgtcattattactatcataaccaccatcactatcatcgtcacatgaacacaagctcactgagggcagagatgtttttattggttttattttccttgctgtatccctagggtctggtacaatgtaggtggccaatacatttttttggttcactcagtatcactagatttactatgattttccatcttcatttgagtgaaaacggcacagatgttcatattcatcaggcatgatctaatagacatgtcattgactggtacttacatgtagggctggggagggaggatggagtccctgaggtcccaaggtccactgtggaggtcccaggagctgaaaagagtcctcatcagtgaaagcagaaagcactctcatggcagaaatggaaagagggtagactattataaggtctgctgcatgtgggcttgagctaggactgtctttggagtaggggcagaggggagcttgagtaacttctgccttcctagctcctttgctcaagaggagttcttatgggcttaagaggaggggccagctcctgctccacttaatataggatcaggggcatgtggacatgagttgaatactcactgctggtgttgggcgcagaggtctgatgggtgaaacctgcgtagagaaggagggaggagactgggtaagggttaaggagatgtgggagatgcaatagggttcagggctaccctggtgcaattaaatgagtttcatgggatggggccattaagatttcctatcagcattctcccaaaagggaagagtgccccaagggaatgcagttcatgatgatgaagaaaccatgaagtccagaacttagtcaccccatgtagagcacatgacaaaattttcaatggccaggcagggagtgtgcccccaagccagagattagaggctgcccagcaaggaggaagagattcctaccatattgcagctcctcaccattgacatagagactgtttctgtccagggtgtagggacccagctctttgatgccattggtcagctggctcagctcccagtatagctgctccctgtccactccagggcttttggggtcaagacggtgggtgcagatggcatccactccagtggctgctccatccttctcggacctgaggaaggtaggagggggaatgacaatgaaaagattgcctaggacttgtcttgagattgctgagggaaacatatcaaggaaccagaggaaatgagaaatctgggaaagaggtgagaatctgcacttagattatctgagtacatagaccactatcttggttgggactgcaagcagagtcatggatataataatttttataaaagtgcaaggtgaaacctgcattctcatggcatggggacaggagaacccagacttcagactagtgaagagcttgaaagggggatggatgtatgtggatgaggtatgattgtcttaagagcagtcctggggacagaatttaacactaaatgaaagggaggggcaggcaaaggagggaatacagaggagtgatcagggtagtgcctcaatcctgatgatggatcacgaaaattctgcctgttgaggtggggaatggtggtgttactatcaggaaacaactggttctcaagccagtgactcctgaattccctttttggtgatgatatccctaggaagtgcagcaaggagacagtgcaaagtcttttaaagtgagaacaattgtggcagccaagctggctcttctaaagtctcacctgagcaaggtcagtctgcagccagagtacagagggccaacactggtgttcttgaacatgggaccaagctgtggaggagggagagagaggtgagtaggagggctaaggagtgtgtgtgttaggggcagatgtgaggtgggaggagtaggcaccaatgagcagggctggtctctgtgggcgggacttccatctctcaggggcaggggtgaggttggtgctatcttctttcatcaccttggcatctatgatgtagaagggactggatatctggggctggcagagtgaggagggaagggcactaaccagactctgcaggactctctctgtggtgttgaacttcctggagccagggcaatgcatgtcctcctcgtacttcaggttggtgatggtgaagttgagggtgaacggcaccaggagagggccagcagctgtagtgggaattgaaaataaacactatgttcaaagtagagaaaataggggtttggaatagacttatctttaaacatatacaaaatttaaattgagagaaaaatatttatgtctcccttgcctataataatacaatttatttttataaaaatatattatataatagtagttagatgctgagcatagctagttgtgcatattcagtgctcaatattgtctgatgttatctgttatctttattatggccataatcattgttgctatcattgtcaccatcaccatcattattatcatcatcaccatgataatccccatcatgatcaccacaaacataatcatcaccacactcaacacatcatcattatcataataaccacatgaccatcactggcatcatcctcatcaccattattgttattgtcatcaacgtcaccactaccatcatcaacaccatcagtaccatggtcaccatcatcaacagcaccaccaccatcatcatcatcatcacactcaacacatcattaccatcataaccttcacaaccatcactgacaacatcctcatgtccgtcatcatcattgtcagtaacatcaccaccaccatcatcaacagcaacaccataatcataaattatcatcaaactgaatatgtcattattactattaccaccaccaccaccatcatatcatcacatgaacacaagctcactgagggcagagatgtttttattggttctattttccttgctatatccctagggtctggtacactgtaggtggccaatacattttttttggttcactcagtatcactagatttattatgattttccattttcatttgactgaaaatggcacagatgtttgcattcatcaggcatgatctaatacagataccattggctggtacttacttgtggggctggggagggaggatggagtccctgacccaaggtccactgtggaggtcccaggagctgaaaaaagtcctcatcagtgaaagcagaaagcactctcatggcagaaatggcaagaagatagactattatgaggtctgctgcatgtgggcttgagctgggtctgtctttggagctggggcagaggggagcttgagtaacttctgccttcccagctcatttgctcaagaggaggacttatgggttaaagaggaggggccagctcttgctccacttgatgtaggatcaggggcatctggacatgagttgaatactcactgctgctggtgggcacagggatccaatgggtgaaacctgcatagagaaggagggaggagactgggtaagggttaaggagatgtgggggacgcgatagagttcaggactaccctggtgcaattaaatgagtttcatgggacaggggtcattaaagatttcctatcagcatcctcacaacagggaagagtgcccagagggaatgcctctcatgataacaaagaaaccatgaagtccagaacttagtcatcccatgtagagcacgtgacagaattttcaatggccaggcagggagtgtgcccccaagccagagattagaggttgcacagccaggaggaagagacccctaccatatcacagctgctcaccattgacatagagactgttcctgtccagggtgtaggggcccagctctttgatgccattggtcagctggctcagctcccagtatagctgctccctgtccactccagggcttttggggtcaagacggtgggtgcagatggcatccactccagtggctgctccatccttctcggacctgaggaaggtaggagggggaatgacaatgaaaagattgcctaggacttgtcttgagattgctgagggaaacatatcaaggaaccagaggaaatgagaaatctgggaaagaggtgagaatctgcacttagattatctgagtacatagaccactatcttggttgggactgcaagcagagtcatggatataataatttttataaaagtgcaaggtgaaacctgcattctcatggcatgggaacaggagaacccagacttcagactagtgatgagcttgaaaggcggatgcatgtatgtggatgaggcatggttatcttgagagaaatcctggggacagaatttaacacctaaatgaaagggaggggcagggaaaggagggaattcagatgggtaatcagggtagtgtctcaatcctgatgatgaaccatgaagattttgcatgttgagttggggcatgggggtgttactatcaggaaacaactggttctcaagccaatgactcctgaattccccttttggtgaagatatacctaggaagtgcagcaaggaagcagtgcaaagtcttttagagtgggaacaagttgggcacccaggctggctcttctaaagtctcacctgagcaaggtcagtctgcagccagagtacagaaggccaacactggtgttcttgaacataggaccaagctgtagaggagggagagggaggtgagtagtggggctaaggtgtgtgtgtgtcggggcagatgtgaggtgggtggagcaggcaccaataagcaggactggtctctgtgggtggggcttgcatctcttggggggaaggggggaagttgttgctatcttctttcatcaccctggcatggatgatgtagaagggactggatatctggggctgggcagagtgaggagggaagggcactaaccagagtctgcaggaccctctcagtggtgttgaacttcctggagccagggcgatgcatgtcctcctcatacttcaggttggtgatggtgaagttgagggtgaacagcaccaggagagggccagcagctgtagtgggaattgaaaataaacactatgttcaaagtcaagaaataggggtttagaatagacttatctttaaacatgtgcaaaatttaaattgagaaacaaaatatttaccatgtctcccttgcctataataatacaatttatttttatgaaagtatgttatataatagtagttagatgctgagcatagctaatcatgcatattcagtgctcaatattgtctgatgttatctgttatatttatgatgactggccatcatgattgttgctatcactttcaccatcataaacagcaacatcatcatcatcatcacactccacacaccatcattaccatcataaccttcacagccatcactgacaacatccttatgtccatcatcatcattgccagtaacatcaccaccatcatcatcaacagcatcaccatcatcatcaatcatcatcacactcaacatgtcattattactatcataaccaccaccaccatcatcacatgaacacaagctcactgagggcagaggtgcttttattagttttcttttccttgtatctctaaggtctggtacactgtaagtggccaataaatttttttggttcactcagtatcactagatttactatgattttctattttcatttgagtgaaaatggcacagatgttcacactcatcaggcataatctaagggagatgccattgactagtacttacttgcggggcttgggagggagaatggagtccctgaggttccaaggtccactgtggaggtcccaggagctgagaaaaagtgctcatcagtgaaagcagaaaataatctcatggcagaaatggcaagaaggtagactattatgaggtctgctgcatatgggcatgagctgggcctgtctttggagctagggtggaagggagcttcaataacttctgccttcccagctcctttgctcaagaggaggacttatgggtttaagaggaggggccagctcctgctccacttaatgtaggatcaggggcatgtggacatgagttgaatactcactgctgctggtgggcacagaggtccgatgggtgaaacctgcatagagaaggagggaggagacttggtaagcgttaaggagatatgagggacacaataagggtcatggcaatcccaatgcaattaaatgagtttcatgggacaatgagtttcatgggactggggccattaaagaattcctatcagtatcctcacaacagggaagagtgccctgagggaacacagttcacgacaatgaagaaactgtgaagtccagaactttgtcatcccatctacaccacatgacagaatattcaatggccaggcagggagtgtgacttcaagccacagattagattctttccagactctagaaggaaaagactccaaccacatcacagctgctcaccattgacatagagactgttcctgtccagggtgtaggggcccagctctttgatgccattggtcagttggctcagctcccagtacagccgctctctgttgagtccagggcttttggggtcaagatgatggatgcagatggcatccactccagtggctgctccatccttctcagacctggggaaggtaggtggggagaatgactatgaaaagattacttaggttgtgtcctgagactgctgatggaaagacagtaaagaaccagaggaaatgagaaacctgggaaagaggtgagaagctacacttagattctctgagtgcatggactactggcttgcttgggactgtgcacagagtcacagatacaaccatgcttataaaagtgcaaggtgaaacctgcattctcatagcatggggacaggagagcccagacttgagaccagtgaagagctagaaacagggatgaaagcacttggatgaggcatgattgtcttgagagaaattctggggacagaatttaacacctaaatgaaagggaggggcagggaattccgagggatgatcaggatagaggctcaatcctgatgatggaccatgcagattctccctgttgaggtgaggtgtgggagtgttactatcaggaaacacattggtccagaagccagtgactcctgaattcccctttgggtgaggatatccctaggaggtgcagcaaggaagcagagcaaaatctactggagtgggaacaactggggcagccaggctggatcttctaaggtctcacctgagagaggtcagtctgcagccagagtacagagggccaacactggtgttcttgaatatgggaccaagctgtggaggagcgagaggaaagtgagtaggagggctaaggtgcatgtgtgtggggcagaagtcaggtgggtggagcaggcaccagtgggcatggctggcctcagtgagcagggcttgcatcttttgtgggcaagggtgagatggatacaatcttcttccatagccctggcatagatgatgtatctgggatggggcaggagtaaagtgggtggggctctcaccagaccctgcaggaccctctctgtggtgttgaacttcctggagccagggtgacccatgtcctccccatactgcaggttggtgatggtgaagttgagggtgaatggtaccaggagagggccagcagccataactggaatgggaaataaacactatgttcaaagcagagaaaataggagtttgcaatagacttatctttcaatatatgcagaatttaaattgagtgacaaaatattttccatgcctcccttgcctataataatataatttatttttgtaaaagtatattatataatagtagatgctgagcatagctgttggtgaatatttattgctcaatactgtctgacattttctgttaactttattatcatcatcatcaccatcaccatcattgtcacgtcaccatcattattatcatcatcaccaccatgataatccccatcatgaccaccacaaacatcatcactctcaacacatcatcattaccatcataaccccaccaccatcacttgaatcatccttatcaccatcatcatcattgtcatcgacatcaccaccaccatcaacatcaacatcaacactatcattatcatgatcattataaacagcaacactaccaccatcatcatcaccatcacactcaatacgacatcattaccatcacaacctccaccaccatcacctgcatcatcctcatcaccatcatcattgtcatcatcaccaccaccatcatcaagatcaccactatcatcattataaacagcaacactatcactattatcatcacactcaatacatcataattaccatcataacctcctctaacatcaccagcatcatcctcatcaccatcaccatcatcatcaacatcactactgccatcatcaacagtatgaccatcatcatcatcatcatcataaacaatgtcaccaccaccatcatcatcatcccactcaacacatcatcattaccattgtaactaccaccaccatcatcatcatcacaagaatacaagctcactgagggcacagattttttttaaattgattttctttttcttactgtattcctggggtctggtacacagtaggtggccaaaacaaatttgtcacaagcattcttatacaccaataatagacaaacacagagccaaatcataagtgaactcccattcataattgcttcaaagagaataaaatacctaggaatgcaacttacaagggacgtgaaggacctcttcaaggagaactacaaaccactgctcaatgaaataaaagaggatacaaacaaatggaaaaacattccatgctcatgggtaggaagaatcaatatcgggaaaatggccatactgcccagggtaatttatagattcaatgccatccccatcaagataccgatgactttcttcacaaaattggaaaaaactactttaaagttcacatggaaccaaaaaagagcccgcatcgccaagtcaatcctaagccaaaagaacaaagctggaggcatcatgctacctgacttcaaactatactacaaggctacagcaaccaaaacagcatggtactggtaccaaaacagagatatagatcaatggaacagaacagagccctcagaaataacgccacatatctacaactatctgatctttgacaaatctgagcaatggggaaaggattccctatttaataaatggtgctgggaaaactggctagccatatgtagaaagctgaaactggatcccttccttacaccttatacaaaaattaattcaagatggattaaagacttaaacgttagacctaaaaccataaaaaccctagaagaaaacctaggcattaccatttaggacataggcatgagcaaggacttcatgtctaaaacaccaaaaacaatggcaacaaaagccaaaattgacaaatgggatctaattaaactaaagagcttctgcacagcaaaagaaactaccattggagtgaacaggcaacctataaaatgggagaaaattttcacaacctactcatctgacaaagggctaatatccagaatctacaatgaactcaaacacatttacaaggaaaaagcaaacaaccccaacaaaaagtgggagaaggacatgaacagacacttctcaaaagaagacatttatgcagccaaaaaacacatgaaaaaatgctcaccatcactggctatcagagaaatgcaaatcaaaaccacaatgagataccatctcacaccagttagaatggcaatcattaaaaagtcaggaaacaacaggtgctggagaggatgtggagaaataggaacacttttacactgttggtgggactgtaaactagttcaaccattgtggaagtcagtgtggcgattcctcagggatctagaactagaaataccatttgacccagccatcccattactgggtatatacccaaaggattataaatcatgccgctataaagacacatgcacacgtatgtttattgtggcactattcacaatagcaaagacttggaaccaacccaaatgtccaacaatgatagactggattaagaaaatgtggcacatacacaccatggaatactatgcagccataaaaaatgatgagttcatgtctctgtagggacatggatgaaattggaaatcatcattctcagtaaactatcgcaaggacaaaaaaccaaataccgcatgttctcactcataggtgggaattgaacaatgagaacatgtggacacaggaaggggaacatcacactctggggactgttgcagggtggggggaggggggagggatagcattaggacatatacttaatgctaaatgacgagcaaatgggtgcagcacaccagcatggcacatgtatacatgtgtaactaaactgcacattgtgcacatgtaccctaaaacttaaagtataataaaaaaagtgaaaaggatgagaaaaaacaaacaaacaaatttgtccactcagtatcactagatttactatgattttccatctttatttgagtgaaaatgacagagatgtttacactaatcaggtatgctctcatagagatgtcattgactgatacttacttgtggggctggagagggaggatggagtccctgaggttctgagatccactgtggaggtcccaggagctgaggaaaagttctcatcagtgaaagcataaagcactctcttggcagaaatggcaagaggggagactatttatggggtttgttgcatgtgtagcttgagctgggtcggtctcttgagctgggcagagggacacttaaataacttctgccctcctaaatcctttgcttatgaagaggacttaatgggtttatgaggaggggccagctcctgctcctcttggtgtaggaaccgaggcatgtggatatgagttgaatactcactgctggtggtggacacagagctctgatgggtgaaacctgcatagagaaggagggaggagagtgggtaagagacaaggagaggtgggggaccaaatggaggtcaatgctaccctggtgcaatgaaccgagtttcatggtacagggacaattgaagattttctatcagcatcctcacatcaggaaagaatgccctgagggaacacagtccatgatggtaaggaaaccatgaagtccagaccttagtcatcccatgtagagcacatgacagaattttcaaaggccaggcagggagtgtgatctctagttagagattagaggctgcccagcaagggggaagagatttcaaccacatcacagccactcaccattgacatagagactgttcctgtccagggtgtaggggcccagctcttcaatgtcattggtcagtttgcttagctcccagtacagctgctccctgttgagtccagggcttttggggtcaaggcggtgggtgcagatggcatccactccagtggctgccccatctttctcgggcctggggagggtcagtgggaaaaatcacaatgaaaagtttatctaggaagggtcttgcgattgctgagggaaggacagcaaggaccagagaaatgagaaacctgggaaagaggtgagaagccacatcgactcttagtgcatggactattggcttgctgaggactgtgagtggagtcacggatacagtgacaagatgaaactgacactttcatggacgggacggggagccggacttgagcccagtgaagagctcgaaatgaggatgaaatcacgtggataaggcatgattgtcctgaaagaaatcctggggacagaatttaacatgtaaaggaaagggaggcacagggaatggagggaattcagagggatgataaagggagaggctcaatcctgatgatgggccatgcagattctctctgttgaggtggagtgtaggggtgttactgtcaggaaacacactgatcctgaagcctgtgactcctgaattccacctttggtgaggatatccctaggaagtgcagcaaggaagcagtgcaaagtcttttggagtgagtacaagtggggcagccaggctggaaattctaagttctcacctgagcaaggtcaatctgcagccagagtacagagggccaacactggtgttcttgaacaagggcttgagctgtggaggagggagagggcagtgagtaggagggctaagttttatgtaagagccaggcagaagtgaggtgggcagggctggccttggtgggggaggcttgcatctctctctttttttcttttttttgtgagatggagtttcgcttttttgcctaggctggagtaaagtggcatgatcttgactcactgcaacctctgcctccttgattcaagtgattctcttgcctcaccctcccaagtagctgggattacaggcatgcaccaccatgcttggctaatttttgtattttagtagggatgaggtttcactatgttggccaggctggtcacaaactcctgacctcaggtgatccacccgccttggcctcccaaatgctggtattacaggcgtgagccaccgctcctggctgaggcttgcatctcttggggcaaaagtgagttgggtttgatattcttccattgccctggcatggatgatgtaagagggactgggtatcatgagcagggcagagtgtggagggcaggacactaaccagaccctgcaggacactctccatggtgttgaacttcctggagccagtgcgacgcatgtcctcctcgtactgcaggttggtgatggtgaagttgagggtgaacggcatcaggagagggccagcagctatagtgggagtgtgaaataaacattatgttcaaagtagagagaatagcactttgtaataaccatatgcagcaattaaattgagtgacataataaatattttccacgcctttcttatctatgatacaattcattttctaaagtagattatataatagtagttagatactgagcatagctcttggtacatatttagtgctcaatattgtaaggtgatatctgttatctttattatcaccatcaccatcatcactatcattgtcatcattattatcattattgtcatcacaagtaccaccagcaccaccatgacaatccccatcatgaaccacaaatatcatcatcaccatcatcacattcaacatatcattaccatcataaccccaccaccatcaccgacatcatcctcatcaccatcattgtcactgtcgttgatatcaccattaccatcatcaatgtcactagcataataatcatcatcatcatcaacaccaccaccatcatcgtcacactcaacatatcattattaccataataacccccaccaccatcaccagcatcattttcttcaacatcatcatcatcatcattgtcatcaacatcactatcaccatcaacagtatcaccagcatcatcatcatcatcatcatcatcatcgtcatcaacagcaccaccaccaacatcatcatcatgacaagaatacaagctcactgagagcagaaattttgtattggttttgttttccctcctgtatctctaggatctggtacacactaggtggccaacaaatttcgttggtccactcactatcagtagatttgctatgattttccatcttcatctgagtaaaaatgacagagatagcatgctctaatagagatgccattgactggtacttactcgtggggctggggctggaggatggagtccctgaggttcccacatccactgtggaggtcccaggagctgaggagaagtcctcattagtgagagcagaaagcattaccatggcagaaatgccaagaggtgagacttttatagggtttgctgcatgtgggcttgagctgagtctgtctttgaaactggggcagaggggagcttgaataacttctgccttcccagctactttgctcaagaggaggacttatgggtttatgaggaggggcagctcctgctttgcttggtgtaggatcatgggcatgtggacatgagttgaatactcactgctggtggtgggcatagagcttcgatgggtgaaacctgcacagagaaggagggaggagtgtgggtaagttacaaggagatgtgggggaccaaataggggtcagggctaccctggtgcaatggaagcagtttcatgcagcagggaccattaaagatttcctatcagtgccctcacatcagggaagaatgccctgatggaattcattccatgatgatgaagaaaccatgaagtcctggccaggtgtggtggctcaagcctgtaatcccagtactttgggaggccaaggcaaggtggagtagaaggtcaagagattgagaccatcctgaccaacatggtgaaaccctgtctctactaaaaatacaaaaattagctgggtgtggtggcatgcacctgtagtcccagctactcaggaggctgaggcaggagaattgcttgaatccgggaggcggaggttgcagtgagctgagatcatgccactgcacctcagcctggtgacagagcgagactccatctcaaaaaaaaaaaaaaaaaaaaaaagataccatgaagtccggaaattagtcatcccatgtagagcacaggaccaaattttcaattgcctgacagtgagtgtgacctcaagccagtgattacaggctgctcagcaaggaggaagagcctccaaccacatcacagctgctcaccattgacatagagactgttccggtccagggtgtaggggcccagctcctggatgccatttgtcagattgctcagctcccagtacagtcgctctctgtccagtccgaggtcttcagggtcagggcgatgtgtgcagatggcatccactgccgtggctgagctatccttctctggcctgggtaagaacctacatatgcttagtccatccacctctccatccttttgtccttcctttccactctttgtcaacccctaatgcagactctgagaaaattgtggttaacaagaatgtggctctcaggctaggcatggtggctcatgcctgtaatcccaacactttgggaggccaaggcaggtggatcatgaggtcaagagattgagaccatcctggctaacatggtgaaaccccgtctcaactaaaaatacaaaaattagctgggcatggtggtacgtgcctgcagtcccagctacttgggaggctgaggcaggagaattgcttgaacctaggagccaaaggttacagtgagccgagatcgcgccactgcactccagtctgggcaacagagtgagactctatctcaaaaaaaaaaaaaaaaaaaaaaaagaatgtggttctcatcagagagatgcccaccataaacaaattactaggattattagtggaagcagaaagcattaccatggcagaaatgccaagaggtgacacttttatagggtttgctgcatgtaggcttgagctgtctgtctttggaaccggggcagaggggagcttgaataacttctggccttcccagctgctttgctcaagaggagggcttatgggtttatgaggaggggcagctcctgctttgcttggtgtaggatcctaggataataatgccagggatctgcatggccccgaataagcctcctgaagtactaggtgtgcgacagctatacttagggttaatctgtaatccatggcagtggcccttgtactggtgcacgtagcagtggccctcctactggtgcccatggcatggcgttttcaaatggtgggatcagaaggttcaagtcatcctctctagatcctatggaccagcagggctaggagatttgttatgagactcaagggagctaaatggcttggggaaaatgccctttttggctggtccgtctgaaactgtggctggtccaacatgcagtcagaaggtcttcatgtctcagcacctgttcccggccacaggatgtggactcacctacctagccacccactattgagtgattagagggaaacgggctctttccctatgtcccagggttgtgagtagctctatagtaggaacgactttatagtaacaactaccatttattaaatacttcctatgcagcaggcccagcattttgtattcataatcacatattttcatcctcaaacatccctatgggttggtactgctcaattccccaagtcagtactatactaattatattatgtataacacaattgtatataacataaaatatataaaatgtagatctgtaaatataaacttaatatagaaatatatgatatcgttttgcattttatacattactatattatatagtatatacaatatatattattatacctctacctaacatatattaaactggtttatatataactattttatataattatataactctataactattatataactattttttatataactaccatatacctctacttaacatatattaaactggtttatatataactattgtatataactatataactatttttatataactaccatgtacatttagatgcttcttgactcatgatggtattatgtcctgataaacacaggttttttattttatttttttgtttttgctttcttttgtttttggagatggagtctcactctgttgcccaggctggagttcaatggtgtgatcttggctcactgcaacctctgcctcccaggttcaatccattctcctgcctcagcctcccgagtagctgggactacaggtacccaccaccacatccagctaatttttgtatttttagtagagatgggttttctccatgtttgccaagctgatcgtgaactactgacctcaggtgataaacctgcctcagcttcccaaactgctgggattacaggcatgagccatgcacccagcctgttttttgttttttggagacaagagtcttgctctgtcatccaggctggagtgcggtggtgtgatcttgactcactgtaacttccatctcctaagttcaagtgattctcacgcttcagtctcccgagtagctggaactacagttgtcacaccacgcctggctaatttttgtatttttagtagagacaagattttgccatttggacagcctggtctcaaactcctggcctcaagtgatccacctgcctcagcctcccaaagtgctgggatgacaggtgtgagccatcatgcccagccctgacaaatccattgtgaactgaaaatgtcataagtcaaaaatgccctgtagccgggcgtgatggctcacacctgtaatcccaggattttgggaggccaaggtgggaggattccttgagcccaggagttcaaggccacctgggcaacatggcaagaccctcctctccacaaaaaaaaaaaaattaaaaaaaaaatagccaggtgtggtggcacacacctgtagtcccagctactcaggaggctgaggtaggaggatcacttgagcccaggagttcaaggctgcagtgagctatgatcgcaccagtgcattccagtctgggtgacagagcaagactctgtctcaaaaataaaaataaaaataaaaatcgactatacctaacctacagaacatgataggttagcctatcctaccttaaacatgctctgaacccttacattagcctacatgtgggcaaaatcacctaacacaaagcctattttataataaactgttgaatatctcatataatttattgaatattgtactgaaagtgaatgacagaatggttgcatgggtgttgaaggtatgctttctactgaatgcatattgctatggcattatcacaaagtttgaaaaatcataagttgaatcattgtaattcatggactgtttatatatagaatatatactaggtatatgtagaagttgtatgtatccacatgtatactatatataatatatatttaaatattacatgtatttatacttatatactttaatatattatatatacacattatattatacatgatatacgttatatgtaatatatataatatgtcatattataacatatgttatatgttaatgtcagatatgttatatacatcacatacacatatatgttatatacattatatataacatataagttatacatatgttatgtatgtatatattacattatatataacaatacataatgtatatgttatatgttgcatataatacgtaacaaatacaatgtatgcattatatataacaattatgtataatataattatatataatatatcatatataacatacattatatgtaacataatgtatattaaactgatttataaaatattatgtatatgttacatatgacagtataagttataacatataatattgttatattataacatatattatgttataacatataatattgttatatcatatgttatatgttaatgtcagatatgttatgtacatcacacatacacatatatgttatatacattatgtataacataaaagttatacatatgttatatatgtatatattatattatatataacaatatataatgtatgttatatgttgtatataatatataacaattatataattatatataacaactatatattatatataattatatataacagttttatataatatataattatatataatatatcatatataacatatacattatatgtaacataatgtatgtgttatatataacttgtactatatatgctataacatatataacatgtatacaatataacaatatgtataatatatacattatatataacatatgttatatacgtatataacatatgcatataaaaatgtgtctataaacatgtttataaaatatgcctcaatatgtatataaaatatgtctatatataatatatgtattttatatatataatatgtcaggaaatagggcacagaaggcttcaggcacttgctcagagtcacagatagtaaatggcagagctgggttggttcagaactgaggtctgcctgagttcaccaatgctcttagccactagggcccccctgtcccctcttccccctgggaaggaaaggaagctggaggtagatgactgacactctctcttgggagagccacacttggagattctgtgagagaggtgtggaaggtgagaatgccaggcaggaaatgatatcaaccgctgtctaccctaaaagacctgccctttccagcactcagggacagtgccctcggtgcctctcagtcaccctcagaccggccaggccctctgtggctgcatctgagccactcaggagctgacctcctgcctgtaagggctgaacgccttcctttcctcccctcttagattctctgggcaagttcccttagagggaagtcagattggggttttccacatgctgcaagttcataatgggggcagaggaggaagtgccacctaagggataggagtttggatatagaacctgaagtgctgcagttgctttgtgtgtcctggcacaagccacttaatctgggcctcagtttccccttctgctcctgcttcatgaggctgttgcaagcactgatgaggcattaaatataaagtacataatgcagtgccttgggtcttaggaatagttatctgctgctgctggtggtgatgcttagtatccatgggcaatagttgttccaagtatgaacagagtcagggagcccagagactagggtcatattcacctgttgggctgtgtttttcttaaggagcgtctcacctgagtgaggctagtctgcagcctgaatagaggtattccagactgctattcctgaacaagggtttgagctgcaaggaaggagaggggaggtgagaaacaacagctgcgggaagccaggaagagtggggcattggaggggtggaccagggtgaggtgggcgtggctgaaatcagtgggcggggcagggaaaggtgggcgtggctggcatcagtaggctgggtggggtgaggtgggcttggctaaaatcagtgggtggggcagggaaaggtgtctggggttggatgaggtgggcgtggctggcatcagtgggcgaggcagtgtgaggtgggctggtttgtctaagtgggcgagggaggagtacggtgggcggggctctcaccagaccctgcagttctctctctgtggcgttgaacttcctggaaccagggtgccgcatgtcctcctcgtactgcaggttggtgatggtgaagttgagggtgaatggcaccatgaatgggactgtggctgctgcaaggaaggagaaaagaaggccacgcctgagtcagatctgaactgactgtaagtcaatttctgaggacccagacggagtgcttgaagcaagagtctgaagcagacaggtgggtgctttagtttggacggataatggaaagccaggtaaggagaaaagtgggatgttcctaaaatgcattacctgggcccagaagcaggttaggggaccagaagcaggttaggggaccagggtaggtgtattgggtcagaacgtgtgcctactggaagctgaggtctcagactctgccaggtgcccatacccgccctaacaaactctagctgagaagttaaaagggaaaaggaccggaacagtctcatgctttggggaacaagaagggaaaaaagagtcaactcaatcccattgaacactgaacaacaacaataaaaatcaaacagcagtccttaaagcagaccttctctcacctgctttacttggctacccttccccactcaagcccaaaactcccaaaactcccagaacttgcccttcctttaataaagaggagaccacatggtagagagacatagttaccatggttacggccacactagtgagtcagatttggtttcaaatctcctctctgcccctcaccagccaagtgaccatggacatgttacctgtccatacctcagtttcttccgctgtaatacaatgggcaatatgggtcgggcgcggtggctcacacctgtaatcccagcactttgggaggccaaggcgggcagatcacttgaggtcaggaattcgagaccagcctggccaacacaatgaaaccccgtctcgactaaaaatacaaaaattagccaggcgtggtggcatgcacttgtaatcctggctacttgggaggctgaggcaggggaatcccttgaacccgggagacggaggctgcagtgagctgagattataccactgcactccagcctgggcaacagagcgagactctgtctcaaaaaaaaaaaaaaaaaaaaaaggcggcgaggggcataatgatattttggagggaaattaggaaggttacatgactgttaaaaagagcacatctccagggcattacactgagtggaaaagaagccaatttcaaaggtgacatgttgtacatttccatttatataacatcttcaaaagaaaattgtagagacagagatggagatggagagtagaatagctattctatgcaatagtgttgggctcagtgggcatgattacgaaggctagcatgaggggaatctttgggggaatggaacagttctgaatcttgatggtggtggtgattatagggctatgcccatgtgataaaaattgcatagggctaccaacacacacgcacacacacatgcatgcacacacgtgcacagacacacacacatgtgcatacatgcacacagatgcacgcacgcacgcacgcatgcacacacacatgcacacatgcacacacgcatgcacacatgcacatatgcacacacaggcgtgcatgcacacacatgcctgcacacacacgcacatacacaagctcacatatgcacacacgcgtgtaaaaccagtaaaatggattttaacaatgtcagtttcctgcttttgatattgtattagagttatgtaagatgtagccattggggagaaactgggtgaaggatacaggggaatgctacactattttcgcaacatctcctgaatttatttattatttatttcaaaatgaaaagttatttattatttatttatattattatttactttatatttattatttatttcaaaatgaaaagttaaaaataaaaaaaatacatagcatatggcatgccatatagtaagtgctcaataacttggttgtcttttattgtcaattgtaattgcttgttccatttcagtcttgcccaatacactgtaaacttggtgaggggagggactgcatttgacttagtcaacatcttatcccccctgcccagcccagaataggtgcctgataaatatttgttaaaccaaattccctggtagcccctgtgctaggtgttcttacgtagagttgcatataacatttgcaaacaatttatgaaatattattatcctcaattggcaggtgaggaaactgaggtactgagaggatgagtaaattgctcaaagtcaacatggctggagaatgaggaggacccttctcctgctcttgaggagttcggagcagagcgaggattaccatgactgctccaggtttcctcacgccatcctttaccaacatctcccagttatatatataatgtgtataactatatatatagaaatatatatatttatatacagagaaacatacatatataactatatatagttacagatatagaaactatatatataactatatatagagagacactatatatatatgttttatatatgtggttactatatggtaactatatatatggttatatataactatatatatggctatatatagttatggctatataaataactatatataacatatatgttatatgtataaccataaatatatttttatataacatataatatatgatataacatctatctatctaaccaagtagaaactttcgaactgaaacataaagtaactgagataaaaagaattcaatggatgggcagaatggagctggtagagaaaaggcttggtgattgtgaaaatattctataaaaattattaaacctgggccgggcgcagtggctcacgcctgtaatcccagctctttaggaggctgaggcgggcggatcacgaggtcaggagattgagaccatcctggctaatacggtgaaaccccgtctctactaaaaaatacaaaaaattagccgggcatggtggcgggtgcctgtaatcccagctactccggaggctgaggcaggagaatggcgtgaacccagggggcggagcttgcggtgagccgagatcgcgccactgcactccagcctgggcgacagagcgagactccgtctcaaaaaaaaaaaaaaaattattaaacctgaaattcggagaggaaaaaagattgataaataacaaaatgaacagaacctcagggtctcttcgggcaacatcatttcattggaggtccgaaggggagaaagaatcagagcagaaaataaacactttgagactcaagaagctgagaacactttaagcaggataaactcaaagaaaaccatgcccagacacatcgtaatcaaactactgaaaatcaatgatgaagaacaaattttgaaagcacctagaaaaagtgacagcattgatcatggaatgacttgctttgtaatacatgttacatacgtacaagcccagaggggttaggcatgtcacataaatggttgaattgattagagcagagcagtgaggaagtggagagtgaacatcctgtctacagcatgtaaaaagtttgcagtgttgtgactcacaaaacataaggcctgaaggcggaattttaattacgggacaccaggttctatctcataactccagaatcacaaggcagggttaagggttaggaatgcccgacctccgtctttttttttttttttttgagatggagcctagctccattgcccaggctggagtgcagtggcacaatctcgaccactgagaaaatttctggctgaggcaggaaaattgcatgaacccgggaggtagaggttgcaatgagccgagatggtgccactgcactccagcctgggtgacagagcgagactccatttaaaataataataataataataataattttaaaaaaattagaaagttgagaagataccaaccatagctggtccccaggaatcgctagtgcaaagctctcgaggttagacagaggttagggtgctagaagaccactcaaggcagggtggtcaaaatttagagagtgggcctggcgtggtggctcatgcctataatcccagcactttgggaggccaaggtgggtagatcacttgaggtcaggagttcaagaccagcctggccaacatggtgaaaccccgtctctactaaaaatacaaaaaattagccaggcatggtggtgtgcacctgtaatcccagctactccggaggctgaggcaggagaatcacgtgaacctgggaggcgaaggttgcagtgagccgagatcacaccattccactccagcctgggtgacagagcaagactccgtaaaaaaaaaaaaaaaaaaaaaaaaaaaagagagagagagagagtgagagggcgagtggaacaggctgagtctgggtggtcagcagggaacagaccatgcagtgttaaatttcatagatgccagagaggagcttcctacctgtggagctggggatggaggatgtggaaatccctggggagaatgtagaagtcactggagctgagaaaaaaagaacatggagaaatgattgggtgtcttcctaaaggaatatgggacaggaactgctcattggaatttggacttctatcttgactcacaccaagaccttgacgggttaggggctgctctgaggctgtggctgggcacgtagggagggagaatgatcagtttctcttctgaggaatgcaccttggggaggaagggtcccaagggcattggaatatcacaggtttgaatactcactgctggtggcaggggtccagtaccgacggttataacctgcagatagggaggaaagagtaaagaaggacaattatgatgggtgagaggtaggggaggggaagatggtagatccagaaatggaaataatgggaaactttcatgatgagcccatctgggctatccctcagccagccagagggaggggaggggcttccaccttcgatgtgtgacttcagctcgcaagggaacctccatctctcagcccagagtggccaaagttgaacaagtcatggacatttcattgagaagaggtggggccaagatcttttgtgaataaaggataatggctatattttatttggtacatattttgtgctttgtcctttgacaataatggtggaaatcatcactattattattcctgaaataaaaataccataatagctgtccctatttattgggaatctagtatatacaaacaataataataaatacattacaagggtggaaagacacatgtatggatgagtgtgctttctacccataaagataatttagtttgattcttactctctcagcttacctcctttcacaaaatttcatgatagtataatttttttccaacttactttctctgtgtgtgtgtgtgtgtgtgtgtgtgtgtgtgtgatgtagaattgacaaaaatgtgatgggtgaagggagtggtgtttttaggtaaaagtacagagaaatgagggatagaaacggttcatatggggccgggcttggtggctcacgcctgtaatcctagcactttgggagaccgagatgggcaaatcacttgaggtcaggagttcaagaccagcctggccaacatggcgaaaccccgtctccactaagaacacaaaaattagcgtggcgtggcggtgggcgcctgtaatcccagctactcaggaggctgaggcaagagaatctcttgaacctgggaggcggaggttgcagtgagcaaagatcgtgccattgcactccagcctgtgcaacagagtgagaccatgtctcaaaaagaaaagaaaagaagagaaaaaagaaagaaagaaggaaaggaaggaaagaaaagaaagaaagaaaggtttcatatggtttggaatattggagaaaatttggcaaaataggtgtggtggtaaaaacaagagacttcaggatgagaggggtggtgttgccattggagcaagaaaggaactggggaaaagagaatttgtcctgagtgtttctctaggtcatggattgcatctcctttgaggctctgtgagagatacaaggaaagacagaacccagggcagccctgttatttatctgggttgttcctgaattatctcatttgattatcagaacaatcccacgtagtatttttattccattccacagaggggacactaaagtctggggaggttacatggcttgtcctgcatccaacaaaacagacatctgtctgtcattcaatagtaccacactgttaagccatgccctaaattagtcataatcctatggacacagaacaggatgtgtacttgatactacaatgaaatactttctgtgtattatctcctatgtcaaggatagaggagtatatatcctctatttcaagtcagatataaaggaaatctccaagtggattcagaagggaagtaacaaattcagcattaggttagatcattagcatagaggccattcatgcctcattcctgtcctgagattggggcttgctctatttggacgatccacagtgatgtcttgtagttaggagcctggagttttcatgagtctccaatcttcggttggagttttcatactgtcctgtgtcataactgagtaattctgggctaattacttcctccctggatgcataaatgctctctgtagaaatgagtatagtaactcacggaggtttgggtaatattaataggagataatgcatataaagttctcatcacaattcctggcacaattcctttttttttttttttcagacggagtcttgctctgtcgcccaggctggagtgcagtggcacaatctcagctcactgcaacctctgcctcccaggttcaagcaattctcctgcctcagcctcccgagtagctaggattacaggcacatgccaccaagcctggctagtttttgtatttttagtagagatggggtttcaccatgttggctgggctggtcttgaactcctgacctcaggtgatctgcctgcctcagcctcccaaaatgctgggaatataggtgtgagccactgtgcctggccctacagtttccttttgatgaaaatgagctgctgttatggttgctattctggtggtggcattgctgcttgggtcattgttgccactgatgttgtgtaaacagttattatttgaggggtatttgctcagggtggggttatttcatgaagtcagtggattccactggcccatggaaactgagaatttgccttgagttgtcatgatggagaaaatgaaggggaggagggtgaactgggcacccagggcccactgcggagactcaaccataggaccctccctcacccatttctttccccgtcgtctgcaaactccagctgggctcttacaggatcaaggtggaggaggaaacatttcataccaggaggtgaaagggaagaggaaattggcctcctttgatgtgctaggcattgaaagatgagccctcagagaactacgagatttgtaccagaacttggaatctgtgtacagcagatgctcaacctcagccctattgacattttggtctggataatgtgttttgataggaggctgctttgtgcattgttggatgttttgcaacatctctggcctctacttactagatgccattagcaaatggccgggcatcatggctcatgcctgtaatcccagcactttgggaggccaaggcaggcggatcacctgaagtcaggagttcaagagcagcctggcgaacatggagaaacctcatctctactaaaaatacaaaattagctgggcatggtggcacatgcctgtaatcccagctactcaggaggctgaggcaggagaatcacttgaacccaggaggcagagtttgcagtgagccaagatggcgccactgcactccagcctgggcaacaagtgtgaaactccatctcaaaaaaaaaaaagttatatgtggatttttgaatgcataggggtcagcaccctgaaccctcatgctgttcaagggcccagctgtagtaataattgccaggaaggaagtgagcatagaggtagaatagagattggctgtgtgcaagatgcgtatacgggggaaatgctactttataaagggtgatccaagctgagatttgaaggacaagaacaccaggtgcaaagactctgagggtggagggatgtttggaccctggaggaaaaaaaaaatgaagctgatatggccagagatgattggacacagcttattcacttactccgttctaaaaatggacactgaagcctggagaggttacatggctcttccggggccacacagtgagcaaaagagaggaccaggacttaaagcaagacctgtaatttaccaaaacctacaccattcattactgcttttaagtcagagtcggtctcaatgaatatatatatatatatatatatatttttttttttgagacagagtcgctctctgttgcccaggctggagtgcagcggtgcgatctccgctcactgcaagctctgcctcccaggttcacgccattctcctgcctcagcctcctgagtagctgggactacaggcatctgccaccatgcccggctaatttttttgtgtatttttagtagagatggggtttcactgtgttagccagggtggtcttgatctcctgacctcatgatccactggcctcagcctcccaaagtgctgggattacaggcgtgagccactgcacccagcctcaatgactattgaaatacaagtttttggcctggtgcagtggctcacacttgtaatcccagcactttgagaggccgaggctggaggatcacttgaggtcaggagttcgagacaagcctggcccacattgcaaaaccgtcgtctctactaaaaacacaaaaaattagccggtgtgatggtgcgtgcctgtagttccagctactcaggaggctgaggcaggaaaatcgcttgaacctgggagaaggaggttgcagtgacccgagatcatgccactgcactccagcttgggcaacagactgagactctgtctcaaaaaaccccccaaaaaacaaaaaaacaaaaattagccaggcatagtggcatgtggcatgagaatcgcttgaacctgggaggcagaggttgcagtgaaccgagattgcaccattgcactccagcctgggcgacagagtgagactctgccaaaagaaggaaagaaagaaaaagacaggaagaaaggaagaaaggaaggaaggaaggaggaaggaaggaaggaaggaaggaaggaaggaaggaaggaaggaaggaaggaaggaaggaagaaaagaaggaaggaaggaaagaaatggaagctttaaatccaggcaaaaagaaagtgtccaaggtggtatagtgaggacatcattaaacaagcattagcttaaattgttggatgagattggacagaggggaacacgctgagacttggtgggcatcaggactcagaccacacagcaattaatcagccactgaatggcagccgacgtttcatgggagctggaagccagattcctacctgtagcgctgggggtggggctcacagatacgagaggccttggagagaacatggaggtcatcggagctgaaagaaaacgcagcgtgaatcgggtttgttgggtcctatcatttagcgaggggagaataggactcttggtgagcactggcatctgtgccttggctcagcctgagacttttgctattctggagtttctgtggggatgagaacctagggaatgggggatactttcctcctggaaggcaggcttagggaggaagaattcccagggcatagggacttcagggccatgtttactcactgctggtggtggagatccaggaccgatggttataacctgcagagagagagggagaggaaggaagaacgaatcagagtgagaagacaggaggaagttaagagaggaaggaggggtagaactcaaaacacaggtgcaccaaccctcctgtgtgctttctctgaggttcattcatgaataacaacagctggggaggctgaggcgggagaatcacatgaacctgggaggcagaggttgcagtgagccaagattgtgccgctgcactccagcctgggtgacagagcgagactccgtctctaaataaataaataaataaatgaataacagctagtctttttttgtttggtttagtttttgtttgtttgttttgttttttgagacaagagtctctctctgttgcccgggctggagtgcagtggttcaagctcatctcactgcagcctccgcctcccaggttcaagtgattctcctgcctcagcctcccaagtagttgtcattacaggcacacgccaccacacctgactaatttttgtatttttggtagagaccaggtttcaccatgttggccaggctagtcttgaactcctgacctcaagtgatccacccactttggcctcccaaagtgctgggactgcaggtgtgaaccagcacgcccagccaacagcttggtcttattagttaactgcctcctacactgatgctcatgatatcctcaccctcattatcattaacaacaatgacaataatcaatcgccagaggccccttcttattgtgggggttcactatgtggctggaatactgccaccttcattaaataaatgatggggacaaaattttctgtttccagccttatttgtgtttccttcatccattacgtataattttgtcattgctgtctgagtttctcctctttcccaacttttcaaagacaggaaagacttttggcagtatagtttctggaattctttcgtgtgaaattgagataataagaggggagggaaagagagagagagagactgactatggggaggggagaggctagggggtccgcaggagatgataaagttgcagaatgagaagaaatgaggaaaaggggattttagtaagtagggtatgttctgaaacatgaattagatcctctttggcactctgtgaatagtgcaaagaaaatttagacttattttacatttgatggtctgactgattttcttgaaacttctgagactggtccaagtggagccctgtggtttacttgggttattaggattttatcttatttgatcttcacaataatcttaggtgacattttaaacattaaaaaaaaatccattccgaaaatagggccaggtgaggtggctcctacctgtaatcccagtactttgggaggcccttgggcggatcacttgagatcaggagtttgagaccagcctggccaacatagtgaaatcccatctctactaaaaatgcaaaaattagctgggcgtggtggcacgcgcctgtagtcccagctattcgggaggctgaggcaggagaatcgcttcagtctgggaggtggaggctgcagtgagccaagaccgtaccactgcactccagcctgggtgccagagggagactctatcaaaaaaaagaaagaaaaaaaaaaaaggacactgaatcctcttgacaggattagtaagatctaacagatatggccgggcacagtgtctcacacttgtaatcccagcactttgggaggccaaggcgtgtggaccacctgaggtcaggagtttgagaccagcctgaccaacatggtaaaaccctgtctgtactaaaaatacaaaaattagccaggcacggtggcgtgcacctgtagtcccaactactcaggaggctgatgcaggagaattgcttgaacccaggagacagaggttcagaggttgtggtgagccgagattgcaccactgcactagggagaatggggaatgggaaattattccttcagtcctgtttggggtgataaaaaaagttttgaaaacagatagtggtgagggttgcacaacaatgtgaatgtattagtactgctgagttgtacaattaaaatgtttagaatggcaatttttatagtatttatattttaccacaataaaaaagttattcttacttgttcttgaggtcacactctcagaggccaaggtggacatcccaggtgtggtcagaggagtaaagaggcttccagccagtgtattgaaggtggttgttgtcttggccacagtgggactggaacctgtggtagctaaattagtggcttcaaccattgtagttctcaagatagtggttggactcactccttctccatgactggttttaggtggtgttggcatctctgatggtatcaaggtcatagtggtgcctgtgacagtcctggaaaattctgggggtccaactgaagttacagatggtgaggtttctgtgttccaggaggtcacagtttggggcttatcagttgttatagaggcactggaaagcccagagacagcaggggaaacagtcagagttagagtactcgtgctggtctctgctgaagagctggtggccagtaagcctgtagtctctagtaaaccaagggaaagagttgaagttggaatcattgtgctggtttctgtccctggatgggtggaaagtggggctgtttttgcagaaacaccaggtgaagcagttggacttagatcaactctgctggttccagttacaagtagggtgaagagagaggatgttgtctgagttgggagagctgtgctagtctctgcaccaggtctaatggtgagtgaggctgtggtctctgatacttgaggaaacacagttgaagcaggaaatgttttacttgtctctgttctgggatgggtgctcaataaggctgtggtctctggcataccaggagaatgagtcaaagttggaacagttgtactggttgctgccccagaactagtgatctgtgaagtcaccatctctggtgcaccaggtgagattgttgtcagtacagctgaactggcttctgtcctaggactggtggccattacaggtgtggcatctggactactatgggaaaaactggaggttgttctggaaacaggtgtgctggtctgtggaggatgagtgacccaggaagccattgtatctggctcactagagggaacagtccgaattggaacagtgaagccagtctgtgtcccaggatgggtagctgatgaggctgtggtctctggttcaccaggagaaggagtcaaagttggaatagctgtactagtgtctgttgcagaactagtgacctgtgaggtcactacccctggtatactgggtgggatggttgtagttggaacacctgacctcgtgtctactccaggactggtgaccattgagggtgcagtgtctgatcccctatgggaaaagttgggaattgtcccagaaaccgttgtgctggtttctgcaggatgagtgagccacgtggctgtagtctctggttcatatggggtctcactcaatgttgggaaggttgtactggtgtctgtcccagaactagggaccagtgaggtcaccagatctgacatatcaggtgagatagttgtcgttgaaacagctgaactggcttctggcccaggactggtgatggctactgggagtgtggtgtctgacttactatgggaaaacttgggagttgtcctgggaaccattgtgttggtctctgcaggatgaatgagctgtatggctgttgtctctggttcatatggggtctccgtcagtgttgggaaagttgtagtgctgtctgtcccagaactgatgaccagtgaggtcagcatctttgatgcaccaggggagacagggagagttggaatggctgaacttgtgtgtgtctcagaataggtgataaatgaggttgtggtctctggctcaccagaagaaagagtcagagttggaatagttatactggtgtctgtcccagaactagtgacctgtgaggttaccatatctggtacatcaggtgagacagttattgttggaaaatctgaagtggcttctgccccaggactggtggctattgatggtgtggtgtctggttcactatgagaataattaggggttgtcctgggaactgttgtgctggtgactgcaggatgagtaacccatgaggctgttgcctctgattcatgtggggactcaggcactgttggaaaagttgcactgatgtctctcccagagctagtgaccagtgatgtcagcacacctggtataccaggtgaaatagttgttgaaatggctgagctggattctgcctcaggactggtgactgtagaaggcatagtgtctaattcactgtgggaaaaccttgaggttgtcctgggaagagttgagctactctctgcaggatgggtgaccaatgagatatttgtaaacggctcaccagtggagacagtcaaagttggaacaacagaacttgcttctgtcccaggatgagcgacccatgagtctatggtctctggttgacttgaggcaacagttagatttgaaaacgcactggtctctgacccagaactagtgaccagtgaagtcaccagcccttgtacagtaggggagacagctaaagttggaatggctgaaatcatctttgcctcagaatgggtgaccaatgaagttgtggtctctggttcatcagaagaaatagtcagagttggaatagttgtactggttactgctctagaactagtgaccagagaggtcaccattcctggtacctcaggtgaaacagttagaacagctgagctggcttctaccccatgactggtggccattgaaggtgtggtctctggctcactagaagaaagagttagaattggaatagttgtactggtcactgccctggaactagtgaccagaggggtcaccactcctgataccccaggtgaaacagttggagttggaacagctgagctggcttctgccccatgactggtggccattgaaggtgtggtttctagttcaccaggagaaagaatcagagttggaatacttgtactgtttactccactagaactagtgaccagagaggtcaccactcctggtacctcaggtgaaacagttggaacagttgagctggcttctgccccatgactggtggccattgaaggtgtggtctctggttcaccaggagaaagagtcagagttggaagagttgtactggttactgccctagaactagcaaccagagaggtcaccattcctggtacctcaggtaaaacagttggaacagctgagccagcttctgtcccatgactggtggccattgaaggtgtggtctctggttcaccaagagaaaaagtcagaattggaatagttgtactagtcactgccctagaactagtgaccagagaggtcaccactcctggtaccccaggtgaaacagttggagttggaatagcagaactggcttcttccccatgactggtggccattgaaggtgtggtctctggttcaccaggagaaagagtcagaattggaatagttgtactgatcactgccctagaactggtgaccaaaggggtcactactcctggtacctcagttgaaacagttggagttggaacagctgaactggattctgccccatgactggtggtcattgaaggtgtggtgtctgatttactatggaaaaaaatggaagttgtccagggaactgttgggctggtctgtgcaggatgcgtgaccaatgaaactgttgtagctggttcaccaggggagtttgtcagagctcgattagttgtacttgtctttgccgccaaactggtgaccattgaggtcaccaaccgtgatacagcaggcgagatagttgaagttggaatggccgaacttgtctgtgcttcaggatgggtgactaatgaggctatcgtctttggttcaccaggagaaagagtcaaagttggaatagtcatatttctgtctgtcccagaactagtgacctgtgaggtcaccagatcttctgcaccaggtgagacagtcataattggaatagctgaactggtttctgccccaggactggtggctattgaaggtgtggcatctgattcatgatgagaaaaattggggattgttctgggaatagttgagctggtctctgcaggatgagtgagccatgtggttcttgtctctgtttcatgtggggacttagtcagtgttgggaatgttgtactagtatctgtccccgaaatagtgaccagtggggtcagtgcatctagttcactaggtgagatatttgttggaatggctgagctgacgtctgccccatgactggtggctgtggaagatacagtgtctaattcactgtggaaaaaattgggggttgtcttggaaacagttgggatggtctctgcaggatggataacccatgaagctgttgtatctggctcactagaagaaacatctagagtttgaataaccggacttctctctgccccagaacgagagaccagtgaggctgtggtctctgattctctattgaaaacagatggggttgtcctgggaagagctgtgctggtttctgctcccaggctggtagccaatgaggatgtcgtttctggaacatcagggaaaacatatggggttgtgatcatcatttctgtggggattgtgctggccatttgcattgatgcattgaggggagtcagtgttcccaaagtgggagtatagacactggtggtcaaggtggctctggaagtggtcttcagagctgtggtggtggtcttcagagctgtggtggtggtctccattctttttgtccctcctgtgtgtagtcctgtaaattggggaatgggcacacaatttgaacaaaatgattacacttactggacttgcaatagcttatttattctccacaggaggaaagggagagaaatgtctctcggttactaggatgtgtctgggatgcttctggaatgggaaaagagattgtgattggtattcccctatcttaccttggtctgtaacttggttgcatcttcacctataactcctctgtgaattcttgaccgctactctattccctcttcccatgtgtttcctgcactgtcagcctctgagccttgttcaagctcttctctctgcctgaagtgcccacttctcatcagattccttaagttctgccattattgaaatccaagcccacatccacctttacaaattcactccagaactcatctttgcttctcaatatttccttatcacactgtctgaatctgcgttgtaccatccttcacagtctcatttgtaacagctattcacgtttgactgtttggcatacggtaagtgctcaactaatatttgttgaatgattgaatgaatgaatatgtggatggatgtatacttaagtggatctcctctgacttgagagagattaagtattgtgtatcatgtgtttgagagcttgggctctggaataagatagccctgcctgggattctggctctttctctaaagagatgggtggctctttaagttaaaaaatattgctggacctccattttcccgtctataaagtggggataagtacaatggccatctcaaagtgttggtaaaaaggcgccaagcacagtgcctcctgggtcacgataagacattactactattaccacgactatgacctgctattgctactgttattactatcacttctccacctaccattactgctgttattgctactgttactactacctattgcaatggttattactatgattactactactagtactgctactactgttactaccactattactattgctactgttactgctaccactgctactactactgttactactaccaccactctacctaccattactgcagttattactactgttaccacaactattactacctatcactatggttattactatggttactgctacttactattactactgctgttgctattactattattactatcactaccacttaatattactactctacctacagtagagtaacagcagtaatggtagtgctctgtcattactgctgttattactactgttactactaatattactgcctattgctatggttattactatgttattactatggttactactattaatactattgttgctagcactattacttatgatttctactgtcactactaccactgctactacctactgctactactgttactaccaacacaactctacataccattactgccattatcactactattactactagtattactgcttattgctatggttattgctacagttactactacttactagtgctattgctgctattgttactaccactactacttaccattactactgtcactactaataattctactacaaaataaacatttgctaaatagaattctccaccaaccacactagacactaccagagctgaccaaggtgactggaatacctttgaacaagattccagtagcattgatgagacagcagctgctgaccaggctttagaaaatggttcctagggaagaggaagaactaactggaggcttctctataaagcccacaaagcctactggagcttggtagagaaagggggtaaaatgaaagggattttgactctgattatggagcagtgtccctgtgttgctggatatcctctaaaaacaatatgtctgagaatgcactctcaagtgcttcatgtgtatctaacaataatggtgaccatgatggtgattatgttgatgggaaggaggaggaggagcaattgcaaagcacttgacatgcactgtctttttaaacctcacaagaacattaaatggcacattctggccaggcgcggtggctcatgcctgtaatcccagcattttgggaggacgaggtgggcggatcacctgaggtcaggagttctagaccagcctggtcaacatggtcaaaccccatctctactaaaaatacaaaaattagccaggcttagtggcgtgcatctgtaatcccagctactcgggaggctgaggcaggagaatgactcaaactcaggggatggaggttgcagggagccgagattgcacctctgcactccagcttgggtgacagagcaagactccacctcaaataaataaataaataaagtgagataaaataaaataaaatgcacattgtataattcttgtcattttacaggagagaaagagaaatccagagaccacaatttaccaaggtcacacacagctattgacagggcaaaaacttgaacatcatcgtatctaaatcctaaacccatattattaaccattgcattatattaattcactaaaggaacttctggatcttgtggggaccagaatggaaagagaatgaagtgaggtgaaaacgcccatctagtaagatggatcttaggatgcattctccagttcagtggttctcaaccaggggcagttttgcttccaggggacacttaacaatgtctggagatatttttggttgtcacaactgtgtgtgggcagaaggtatggcatctagaacagaggccagagaggctggtaaacatcctacaacgcacagcacagcccccatcgcagagaagtatctgccccaaatgacaatagtgtcaaagttgagaaacccagatttttatttatttatgtatttcatattactgccttttaaagtgaaaattttgtttcagactttattcaaaacagaaggaggaattactaaatattgtgacaaagaaaacatataacagtgatgtcataaaccatcttacatttatatcgtgtttttattccccccattgtacttacatattgtgatttagctctccagtgatgacaaacaaaaataacccaggagctcacccatcttctttatttaagtgacagttaaaaaaaatgtacagttccaaatttttcatcatgggagatataatcctagatatttttgtgaagtttctcttacaagagagttatgtctgtttttcaaccagggcatacataaaggctgttaatttatacttccttttcctacatttgctagaactattgggatgcattttcagacatactctgtctctctctctctctctctctctctctctctctatatatatatatatatatatatatatatatatacatacatatatatatatacatacatatatatatacatatatatatagtatattttatttaaataaaatatatatatatatatataatttatttatttatttttgagctggagtcttgctctgccacccaggctggagtgcattggcacaatctcagctcactgcagcctctacctcctgggttcaagtgactctcttgcctcagcctcctgagtagctgtgattacaggtgtgtgccaccatgcccggctaatttttatattttcagtagagatggagtttcaccattttggtcagactggtctcgaatttttgacctcaggtgatccacccacctcagcctcccaaagtattgggattacaggcatgagccactgcgcccagctcatagtaagtttttaatgagcatttttaaaatttggttaatatggacaaatttgtgaatatttgatgttggacaaaactcactcagcatgccatgaggagaaagagaagtggtaacatctgcctggtaaccattagataaagactcagttcagacagggaaacctatgacaaccacacacaattctctctctaaagaatacaaacattttgtctctctggaggaggaaatatggtcacgagtggcattactgggaggtaagcaaagttaaacctacctttaggactggcaggcgaagtggatgtctgagggcctttgactggtcttatggtacctctgtgtgctgcttcattgggtatttttgtgatgtgttccataatgccatcagttcctgaagatgaaggtggggagaaaaactggggtaactcatctcattcagaagaagagcactgtctaaatggatccacttcattggccacaaacactcctcaagtccatcagtatgaactggagctgggactatgtgccataagtggccacacctgtccatagatccatccacctacctatagatttgtccatccttcctttcattcatccctagatctgatcatctattcttccattttttcttccttttattctttccttctatcacccattcttccttttgtctttcctcccttctttcctttctcttgctttttaaaattttaatttaaaagtttgtatttcaatagctttgagggtacaagtggttttttcttatatggatgaatcatatgtggtgaagtgtgagattttttgtgcaccctcctttcttctttccatccatcttttcttcaatctttacttcatttcatccttctacctttctttccttcaatctatatccccttcaatcctgtcttccatcatctttctttcttttcatccttccttctgtgcatctatccttcctccgcttcatctttgcttccttccattcactcttctctccattcttccttttatccatccaactacacttctcccttctcgccatgccattcatcacttgcttactgaacacccgtgactcaactactgagtcacatagtaacatatgggtcaatagccaccaatgtgtctaaatttagtgtgaattacaaaataatgtgaagaaggagagggagcaaatcattctcctggagatattgtccagtgaggcagaaactcgagtcgttggagggcctctttggatttgtgtccagaacaaaagttggtgccaagctcaaccctttcagaggaatggaatccccaagaagttccttcctttatctactgacctcttggaagtagtgtttcctccttctaggctctgggtgtcttctaccttcttaggtactttgttccctctattttcattaattcactttttcctttcacttatcccttttgtctcttgctcaactcaaagggagaaaccctcccttacgtctacgtagtattttagctgttcttctaatgccctatacctcactgatgctcccttcattagaatccctgagaacccccatgttgccaaagcacttctcacctcatttcaacttggcaattctgtggtatttaacagaacttaccatttctccttcctaaaaccctcccctcctgtggcttctgtgatgccagaacttcttgccttttctgttacctctctgaccactcctgtttagcccagcagttaggagcatgagttcctagtgacacacaatttgagttcttatcctagttctattgctttctagctatatggacttaagaaagttacttaatctccctgtgcctaaatgtcttcatctccaaaataggcttctaataatctctacttcaattagtgttacaattgaggatcaaatagcttaataaaactgcacttgaaacagagtaagtactgttataaatattttctgttgtcattcttattgtcatcatcatcattactagtagtaatattagagcacctatcacgatactgtaatgattcaattatttgcttatttttgtttctccaattccttaacccagtgcctaggagtgaaattagataaacacatgtttgctaagagaatttctggtacaggaataaactagttaactctttttttgcttcttaggaaggggtcatttcctatgagcccccaataatgggattgtaggggctgtgggtccttacttgtcaaccgtgttgagagtgaaggaacttgataagcacttgtcactgttcccagctcaacgctctctgtcattctggtatccaaaatgggtgatgaagatgtcctgcctggttggcttgaagtgtccaaagtactgaccataaccaagcgtccttcagtagtgctgctctctgtcccaagactggtgtccactctatatggggtagctgaagaggaagttatctcatggagggctgggatggttgaagaatcagtggtagtgaaggttgaagaggagaatggcacaggagtggatgaaggcaggctctctgcaatggtggacagagtagcatccccagggcctgactctgtcctagagaatggactacctgaacctgagatggctcgtggaactccagtggtggcaaatgaagtcatggcctctgatagagaaggcatcactgtgccagtggaaatagtctcagctgaaggcagcaaatctgtactcagatgatgagtactttctgttacagacatagtaaacctggattctgggaaggaggttatcccagtggactccgtaatagatggagaagcattaaagggggtgattatgtccactggaatttcagtatactgtgaggctggaggccagtctggggatgatgtttttgcagaagaggtgaaatcagtcttggaactctgtaaaaggtgagtggacccaggagaagaaggtgtatttgttggtgtgactgagctggtgtccagggacatgtttgtcttcctaaatccagaagtcaaatgagaaaatggctcagcctcaaatcctgtggtctcaaaattagcaggcattgatgtggaaatagaggtttcagccatggaagagggagtacccactgggtatgtagccttggatggctccgagtggattgaaacagaggaatatagttcatgtccagaactggtggttcccacattggtcactgccatgcttgaagaaggatgaattttctctgtatctgtggtgacttcagaggcagccagtatttcaactgaggtgccactcagatttggagataaactggttccaggttctgtgcttgtgtctgtagtcttcaccatgcctggggtgaggagtgaagtcacagaaaaagaggaggaagggatactctgcggtaatgtggaagaaacagaaggtgaggtcgtgacaggtaaggacaacagagaagatgaagagctagttttttccacaaagagagagctcttccatgatggattttcaggactcctactcataagagttgtcatctctgagtgtaaaaatctaggaggaacagttgagtgggtccttgccaagggggctgttgttgtggccaaggtaagagtactctgtgctgtagccccaggagaacttttttgggtggtgatggtcatttgtgttgattctgacatcatggatgaggaagagagcctggtgatcacttcagtgatgatgtctggagacatcgtggactgatcagagtcagggatgtgtattctattagaggacatgatttctgtcatggagacttcagtagtagcactagtgggcactccataaaggactgcacttgtttctgtgattgaggtggtctcttcagaggtgctagtctccctgaatccaggagtcaatgagaatgttggctctgtcggaatcctcctagtctcagagaaggcaggatttgatgtgaaaacagtggtatcgtccacagcggaggtgatacccattgaaggtatggttatggttgtttctgagtcagctaggacagaggaatgagattcatgaacagaactggaggtcctcactttggccaccgctgtgtttgaggaaggatgaattttctctgtatctgtcatgatttcagaggtggccggtatttcaactgaggtgctgctcaaatttggagatgaactggttttaggctctgagcttgtatccaacacttctgtagtcttcaccaggcctgggaggataagtgaagtcacaggaagaggagaggaggggctactgtctagtaatgtggaggacacaggagaaagtgaggtcgtgagaggtaatgatgtcagagaagaggaagatctagttgtttccacaaagcgagggctcgtccatgacagactttcaggacccctgctcataagattggtcatctctgagtgtgaaagtccttgagacatagttgagtgggtccctgacaaaaaggtcattgaggtgcccaagggaagggtaacctgggatgtagccagagaataacctgtttgggtggtgatggttatttctgcagattctgtcatgatgggagaggtagacagcctggtgacaacttcatcggagatgtctagtgacattgtggactgagcagggccaggaatggatgttctgctagagggcataacttctgtcctggagacctcaggagtggcaccagagggcatcttgtaaaggacagtgcttgtctctgtggatgaggtgatgtcctgggaggttctggtctccctcagtccaggggtcagagatgacattgactctatctcaatccttgtaatgccagaggagccaggcattgttgtggaaaccatgttgtctcttatagaggaagaggtgaccactggagatatcacttttgttggctctgagaagcctggggaagaggaatagagttcctctgtagcactggtggtttccacatgggacgctgctgtattttcaaaaacgtgaattgcctctgtctccgtggtggctttagaagcggccagactctcatctgaggtgatattcatattgggagctgaagtggtctcaggttccaaacttgcatccaacatgtctgtggccttcatcatgatagaggtgaaaagagaagtgacagggacaggagaggagtggctactcccagatggtgtggaataaagtggcgaaggtgaggttactgaagatgaagataccagggaagatggagggctgtttttttccacagacagcgggcttggccatgacacatcctcaggacctctgctcataggagttgtcaccactgactgtggaaatctctgagttgtagctgagtgagttcctggccaggaggctgtgcttgatgagtccaaggtaaaggtaccctgcgaggtagccccagaaggacctgttttgggggtgatggccatgtctgttgattctttccttgtgaggggggtagaaattctagtgatggtttccatggaggtgtctgatgacattgtggattgagcagggcctgggatggatgttctgctagaagagatggcttctgtcctggagacctcagtagtagcaccagtgggcacactagaaaggacagtgcttttttctgtggcagagctggtctcttcagagatgctggtctccatcaacccaggagtcagtgagagctttgactttgtttgaatcctactggtgtcagagaaggcaggggttgatgtgagaacatttgtatctcctgtggggtaggtgatacccattgaagatgtggcctttgttgtcactgagtcagctaggacagaggaaggagattcatgtgtataacctgaggttaccacattggtcatctccagtttctctgtatctgtagtgacttcagtgatggccagtatttcagctgaggtgctgctcaaatttgggggtgaactggtttcaggttctgagcttgtgcccaacagctctgtggtcttcaccagccctgaggtgagaagtgatgtcacaggaagcgaagaagagtggatgctgtctggtaatgtggaagaaacgggagaagatgaggtcatgacaggtgaagacagtgagaaagaggcagagctggcttcttccacagagggatggcttagccatggcacatctccaggagttctactcataagagcggtcatctgtgagtgtgaaaatccttgagatgcagttgagtgggtccctgacataaaagttgttgaagtgtccaaggtaagggtaccccttgatgtagccccaggagaacctgtttgggtggtaatggtcatttctgtagattctgtcttgatgggggaggtagagagcctggtgatcacttcagtggatatgtcttgtgacattgtggactgatcagggctaggtcctctgctagaggacatgacttgtgtcatggagtcctcaatcgtggcactagtgagtgccttgtaaggaacagtgcttggctttgtggctgagtggatctcctgggaggtgctggtctcccttggtgtgggggtcagggtggatgttgactccatctcaattcttgttatctcagaggaagcaggtatggttgtagaaacaatgtcttttatggtggaagaggtgaccactggagatgtcactttggatggctctgggaggcctggataagaggaatagaattcttgtctagcgctgatggtgcccatctgagtcacagctgtgttttctgaaagctgaattgcctctgtctccatggtggctttagaagtggccagactctcatctgaggtgatattcatactgggaggtgaagtggtcacaggttccaagcttgtgtccaacatgtctgtggtcttcatcatgacaggggtgaaaagagaagtcacccggagaggagatgagtggctactctcagatggtgtggaataaagtggcgaaggtgaggttactgcagataaagacaccagggaagatggagggctagttttttccactgatgggcggcttggccatgacacatcctcaggacctctgctcataggagtggtcatccctgagtgtggagatctgtgagttgcagctgagtgagttcctggccaggaggctctgcttgatgtgtccaaggtaaaggtaccttgtgaggatgccccagaatgacctgttttgggggtgatggtcatttctgctgatcctgtcgtggtgaggggagtagaaattctagtgatggtttccgtggagatttctggtgatattgtggattgagcaggacctggggtggatgttctgcctaaggagagggcttctgttctggagaccttagtagtagcaccagtgggcattccagaaagagaagcacttctctctgttgctgagctggtctcttgagaggtactgatctcccttaatccagaagtcagggaggaagttggctgtgtcatcatagtttctgggaaggcaggagttgatgtggaaacacttgtattccccagagtggaggtggtagccattggagatgtgggttttgttgtcactaagtcagccaaaacagaggaaggggatagatgtttataaatcacagtccctacattgactacaggtgtgtttgaggagggatgaattttctctctatctttggtgacttcagacgtggctaatatttcagctgaggtgctgctcaaatttggaggtgaactggtttcaggttctgagcttgtgcgcaacatgtctgtggtcttcactgggccaagggtgagaagtgcagtcacaggatgaggagaggaggagatgctctctggtaatgtggagaaaaaagaagttgaggtcatggcaggtgaagacagtgaggaagagacagagctggcttcttccacagagggaaggctcggccatggcacatctccaggagttctactcataagagtggtcatctctgagtgtgaaaatcctggagatgcagttgagtgggtccctgaccaaaaggttgttgttgaggtgtccaaggtgagggtaccctctgatgtagccccaggagaacctgtctcaatagtgatggcactttctgctgattctgtcataatgggggaagtagaaagcctggtgatcgcttcagtagagatgtctggtgatatggtgaactgatcaggccctgacatggatgttcccctagaggatatcacttctgtcctggagacctcagtggtagcaccactgggcacttcagaaaggacagtgcttccctctgtggctgagctgatcctctcagagctgctggtctccctcaatccagaagtcagggaggatgttggttctatctgaattctgctggtctcaaagaagtcagaagtggatatggaaacactcgtttcccccatggtgtaggtggtacccattggagatgtggctttgggtgtctctgagtcagataggacagaagattgtgattcatgtccagaaatggaggtcctcacgttggtcactgctgtgtgtgtggaaggctgcatgtcttctgtatctacagtgtcttccaaagtggtcagtctctcatgggaggtgctgctcaaatttgaagtggaactggttccaggttctctgcttatgcccatcctgtctgtggttatcaccaggccagggttgagaagagaagtcacaggaagagaagcggaagggaaatcctctactaatgtagaggaaacaggagaaggtgaggtcgtggcaggcagagacagcagggaagaggcagagctggtttcttccacagaggattgactaggccataacatatcaccagggcttctgctcacaagagtggtcatctctgagtgtgaaaatctctgagtcacagtcgagtgggtttctacccagttgggtgttgttgatatgtccacagtatgagtactctctggtgtagacccaggaggatctgtttgtgtcttgatcatcatttctgctgattctgtcattatgctggaggtagggagtctggtgatggtttctgtggaagtctctggtgacactgtgagctgagcaaagcctgagatggatgttctgctagaggaggtgacttctgtcctggagacttcagcagtggcaccagtgggcactccagaaaggacagtgctcatctctgtggctaagctggtcccctcagagctgctggtctttctcagtccaagggtcagggaggatgttggttctgtctgaattctgctagtctcaaaaaagccaggagttgatgtggagacactcgtatcctccatggtggaggtaataaccattggagatgtgactttggatgtctgtgagtcagctaggacaaaggaagtggattcatgtccagaactggaggtccccacatcggtcactgttctgtttgaagaaggatgagttttctctgtatctgtggtgacttcagaggtggccagtatttcaactgaggtgctgctcaaatttgcaggtgagttggttacaggttctgagcttttgtgcaacatatctgtagtttttgccaagccagacgtgaggagtgaagtcacaggaagaggagaggaagagatgctctctggtaatgtggaggaaacaggagaaggtgaagttgtggctggtgaagacatcagagaaaaggaaggtctagttttttccagaaggggagggctcatccatgatacatcctcaggacccctcctcataagagtgctcatctgtgagtgtgaaaatccttgagatatagttgagtgtgtcattgtcaaagaggttgtgcttgacgtgtccaaagtactggtgccttgtgttgtggcccctaaaggacttgtatgggtgttcatggttatttctgctgattctgtcatgacaggggatgtagagaaccagctgacggttcttgtggagatgtctggtgatattgtggattgagcgggacctgggatggaggtgacgtcttccttggagatctcagtagtagcaccagtgggcactttagagaggacagtgctcatcttggtgcctgagctggtcccttcagagccgctggactccctcaatccaggggtcagggaggaagctagctctgtctgaatcctcctagtctcaaggaaggcaggagttgatgtgagaacacttgtatcccccatggtggaggtggtacacattggagatgagtcagctaggacagaggactgtgatttatatccagagctggtggttgccacattggtccctcctgtgtttgtggaaggatgcacggcttctgtatgtgcagtgtctttgtaagtggtcagtctctcatgggaggtggtgctcaaacttgaagatgaactggttccaggttctgtgcttgtacccaagatatctgtggttgtcgccgggccagaggtgagaagtgaagtcacaggaaggggagagggggggatatgtgctaggaatgtggtggaaacaggatgaggtgaggtcacggcaggtaaagacagcggggaggatggagggctggtttctttcacaaagggagggctaggccatgacacacctccaggacctctgcccatggaagtggtcatctctgggtgtggaaatccctgaattactatagagtgggtttccacccaagagggtgtggttgctgtgttcaaattaagggtactttctagtgtagactccgaaggacctgtttgggttgtgatggtcatttttgcagattctgtcaggacagaggaggcagaaatcctggggatggttcctatggagatgtcttgtgacattgtggactgctcagggcctgacatggatgttctgctaaaggagatggcttctgtcctggagacctcagtagtagcaccagtggacactttagaaagaacagtgtttgcttctgtggctaagctggtctcttcagaggtgctggtctccctcaatctggtggtcagtgaggaagctggctctgactgaattttcctagtgttagataaggcaggagttaatgtagaaacacttgtatcccccataatggagatggtacccattgccgatgtggctttggttgtctctgagtcaggtaggacagaggaaggggattcatgtccagaactggaagttccaactttggttactgccgtgtttgagaaaggatgaattttctccgtatctgtggtgacttcagaggtggccagtatttcaactgaggtgctgctcaaacttggaggtgaactggtttcaggttctgcacttgcgtccaacacctcagtagtcttcacttggcctggtgtgagaagtgaagtcacagaagcagaagaggagtggctacttgctggtaatgtggaagaaacaggagaaggtgagatcatggcagataaagacagctgggaagatggagggcttgtttcttccacagggagagagctgggccgtggcacatccccagcacctctactcacaagagtggttatctctgagtgtggcaatctctgagtcatagtcgaatgggttattaccaaggagggagtggttgatgtgtctaatgtaaaggtactctctgatgtagacccaggaggacttgtttgggtcttgatggtcatttctgatgattctgccaggatgggggaagtagggaacttaatgatttttcttgtggtggatatttctggcaacattgtggactcagcagaaccagagatggatgttctgctagaggaggtgacttctgtcctggagatctcagtagtagcaccaatggacacttcagaaaggacagcacttgtctctatggctgagcttgtctccacagaactgcctgtctccctcaatttagggctcagggaggaaattgactctttctgaattctgctagtctccaagaagtgaggggttgatatggcaacagttgtatcctcctgggtggaggtaataaacattggtgatgtggctttggatgtctctgagtcagctaaggcagaggaaggggattcatgtccagagctgggaatctccacattggacgctgctgtgtttgtggaaggatgcacagcttctgtatttgtggtgtccttgccagtggtcagtctctcatctgaagtgtggctcagctttggaggtgaactggttacaagttctgggcttgtgtgtaacatgtctgtggtcgttaccgggctagaggtgagaagtgaagtcacaggaagaggagaggaggagatagtcactggtaatgtggaggaaatgggaggaggtgaggttgtggcaggtaaagacagcagggaagggagagagctgggattttccagagagggagagctttgccatgacatatctccaggacctctgctcatgagagtggtcatctctgagtgtggaaatctctgagtcaaagttgaatgagtctttgcctgggactttgtggtggatgtgtccaaggtaagggtatcctgtgaggtagacccagaaggacctgtttgagtggggatggtcatttctgctgattctgtcatggtgggcgaggcaaagagccttgtcattgttcttgtggatatttctggcaaaactgtggactgagaagggccagggatggatgttctaccagaggaggtgacttctgtcctggagacctcagcagtagtaccagtggggacttctgaaagaacaatacttgtgtcagtggaaaagctggcattttgggaaatgctggtctctctcagtccaggagtcaaggaatatgttgactctctcttaatttttgtagtctcagaggaaacagacattgatgtggaaacagttgtatgccccatggtggaggtggtatccattggagctgtggccttggttttttctgagtcagctaggacagaggattgtgacccatgtccagaactggtggtttccacattagtcgctgctgtgcttgtggaaggatgcatggcttctatagctgtggtgtcttcatctgttgtcagtatctcatgtgaggtactgctcaaatttggaggtgaactggttgtaggttctgggcttgtgcccaatgtgtctgtggtcatcactaggctaggggtgagcagtgaggtcataggagaaggagtggtgtgaatggtctttggtaatgttgaggaaacaggaggtgaagtcatggctggtgaaggcatcagggaagaggagaagctggttttctctatagaaggagggattgtccatgatagaatctcagggtccttgttcatgacagtggtcatttctgagtgtggaaattcctgagtcgccatcgagtgtgttcctgccctggaggatgtagttggtgtgtccaaggtaaatgtgccctgtgatgtagagccaagaggaggacctgttcgagtgatgatggtcatatttgaagattctgtaatgccaagggagataggcaggctggggatcacttcagtggagatgtctggtgactctgtggaatgatcagggcctggaatggatgttcttctagaagaggcaacttctgtcctagaggtctcagtagcaccagtggtcaacttgtgaaggacagcacttttctctgtggatacgatggggtcctgggaggtgctggttcccttcagcccatgagccagggagaatgttgactccatctcaatccttgtaatctcagaggagccaggcatggatgtggaaacaatggtgtcccttatgttgaaagaggtaaccattggagaggtgactttgggtggttctgagtaggctgggacagacgaataagattccttttcagaagtggtggtccccacattggttactgctatgtttgtggaaggatacattttctctgtatctttaatgtcttctgaagtagtcggtatcttatgtgaggtgctgcccaagtttggaggtaaactggccacagatgccagcatatctgtggtcttcactaggccagaggtggggagtgaagtcagatgaacaggagaagacggcctactttctggtaatgtagtaggtacaggggacggtgaggttattgctggtaaagacagaagggaagaggaagagctggttttttccacagagggtgggcttgtccctgatatgtactcaggaactctactcgtaagagtggacaaatctaattgtgaaaatccatgagtcatagctgagtgggtccctgcctgtgaggttgtgattgatgtgtcccaggtaagggtaccctgtgatgtcgccctatgaggacctgtttgggtggcaatggtcctttcttcggattttgtcaggccagcaaaagtagaaagcatggtgacagatcttgtggaggtgtccggtgacattgtgggcttttcagtgccttggatggatgttctgctagaggaggtgagttctgttctggagacctcagtagtagcagcagtgaatgctttgtcaaagaccgtgcttgtgtctgaggatgagccaattttctgggaggtgctagtctccctcagtctaaatatcagggagaaagttgtctcagactcaatctttttcatcgcagaggatctaggcattgatgtggaaactattgagtcccccgaggtggaagtgataactactgcggatgtggctttatatgggtctgagtcaggtgagacagtaaaatagaattcatttggtgaactggtggtccccacattggccactgctgtgtttatagaaggatgcattgtgtgtgtatctgtggtggcttctgaagtggccaaggtgttccttaaattttgaggtgaacgagtcacaggttctaagtttgtgtccatgtctgtgatcttcgccagtgtaggggtgggtactgaggtcacagaaacaagagaggaggtactgtgctcttgcaatgtggaagttacaggagaaggtgaggttgtcacaaggagaggtgcctgagaagagagagagttggcttcttctgcagagaaagggcttgtcttcaacacatcattgagatcattgttcatgacactggttgtttctgaatctacaaaatcctgagttctggctgatggagttcctgctgaggtggctatggttgatgtgtccagggtcagttggccaagagatgtcaccccagaaggacctgtttgtgtggcgatggtcttgtgtgtagatattgtcaagggaggagagttagaatgactgctgctggcttcaggtgaaatgtctggggactttgttgactgagcagaagctggcatgaatgtaggatcatagtaggtgacttctgccctggagacctcagtagcagcatccagggacacactggagaaaacagtgtttgactctgtagttgagttcatcaccagggcggtgctgtcctctttcagttcaggagtcagaggggatgttgagtctctgtcaacatttttagtctcaggagaaccaggtgttgatgtggaaacaatagcgtcctccatcatagatccagtaacctttggaggtgtgtgtccggatggctgggagtggattgagacagaggaatgtagtttatgcatagaattggtggtccccatattggtttctgctgtgttctctgaaaagtgaattgtctctgtatttgtggaggcttcagaagtgagtatctcacctgagaagctacttgcacttggtaaggagctggtcacaagttctgagtgtgtgtccaacatgtctatggtcttcctcctgccagaggtgagaagggaagtcacagggagagcagaagtggggctacttcctgatactgcggaataaagagatgaatgtgaggttattgcaggtaaaggcactggggaagaaggagaactggtttcttccacagagggagggctttgccatgacacgcccttagtacttctgctcatagtagtggtctcctctgagtgtggaaatctctgagtcacaggtgagtgagtcccttcccaggaagctgtgcttgatgtgtccagggtaagggtagcctgtgagatagtccctataggacctgtttggttggtgatggccatttctgtggatcctgttacaaaaggaaaagtggagagcctggtgatggtttctgtggagatgtagggtgacattttggaatgatcaggccctgagatggttgttctgctggaagtgataacttctgtcctggagacctcagtagtagtagtagtgggcacttctgaaaggacagtgctggtctctgtcacagtgttgatctcctcagacgtcctggtgtcccttaatccaggaatcaaagaggatgttgattcagtctgaattctagtctcaaagaaggcaggagttgatgtagaaacacttgtatcccccatggcgaaggtgatacccattggagatgtggctttggatgtgtgtgaatcagctgggacagaagattgtgattcatgtccagaaatggaggtccccacgttggccactgcagtgtttgtatgcatggaagcatgcatggcttctgtgtgcgcagtgtctttgtaagtggtcagtctctcctgtgtggggctgcttaaatttggaggtgaactcgttacgggctctgggcttgttgtgcccaatacatttgtggttgtcaccagaacagaagtaagaagtgcagtcacagggagaggagaggaggggatgctctctggtgatgtggaggaaacaggagaaggggatgtcatggaaggtgacatcagggaaaacccagagctggtttcttccacagggggagttgtcatccatgacacatctccaggggttctgctccgaagagtggttatctctgagtgtgggaatccctgagacacggttgaatgagtccctccctggaaaagtgtggttgatgtgtcccagggaaggataccctgtgatgtagccccaggagtagttgtttgagtggtgacggtcatttctgcagattttgtcatgatgggggaggtgaagagcctggtgatcattcctgtggagatgtcgggtgctattgtgggccgatcaaggtctgagatggatgttctgctagaggagatttctgttctggaggcctgagtaatagcacctgtgggcacataagaaaaggcagtatttgtctctgttgttgagctggtcttctcagacgtgctgctctccctcagtctagggctcagggatgctgttggctctgtttgaatttggttagtctgagagatattaggagttgatgtggaaacacttgtgtcccccagggtggaggtggtactcatcagaggtgtggctttcgatgtctctgagtcagctaggacagaggattgtgatttatgtccagacccggaagtccctacattggtcactgcggtgtttgtggaatgatgcatggcggcttctgtgtgtgcagtgtctttgtaagtggccggtctctcatgagtgatgctgctcaaatttggaggtgaactggttacagactctgggcttgttgtgcccaacacatctgtggttgtcaccagaacagaagtaggaagtgcagtcacaggaagaggagaggaggggatgctctgtggtgatgtggaggaaacaggagaaggggatgtcatggcaggtgaagacatcagggaagacacagagctggtttcttccacagggggagttgtcatccatgacacattcccaggacccatgcccatgagagtggtcacctctgagtatgggaatccctgagtcacagttgaatgagtccctccctgggaaagtgtggttgatgtgtccaagggaagggtactgtgcgatgcagactcaggaggacttgcttgggtggtgatcgtcatttctgcagattttgtcttaatagaggaggtgaagaccctggggatctctcctgtgaaggtgtcaggtggcactgtggacttatcatggtctggggtggaaattttgctagaagagttgacccctgtactggagacctcagtaatagtaccagtggggactttggaaagtagaaaacttgtgtccgtgggaaagctggactcctgagaggtactggtctctctcagtctaggagtcaagaaatatgttggctctctcttaatgtttgtagtctcagaggaaccatgcactggcattgatgtggaaggagctggatctcccacagtggtggtgataaccatttgagttgtggctttgggtgtctctgagtcagccagtgcaggggaatgggattcatgtccagagttgttggctttcacattggtctcttctgtgtttatagaaggaaaaatttcctttgtgtctttactgtctttagaagtggccagtatcttatctgaggtgctgctgaaatttggaagtgagctggtcacaggttccaagcgtgtacgtaatatgtctgtaatcttcactaggccagaggtgagaagtgaagtcataggagaggagagcttatcctctggtaaggtagaagaaatcagggaaggtgtggtcattgcaggtgaggacagaaaggaagagggggagctggttttatccacagagggaggacttgtccatgatacatcctgtggaattctgctcataagagtggtcacatccaattgtgaaaatccatgagtcatagctgagtggatccctgcctggggggttgtatttgatgggtccatggtaaaagtatcctgtgatgtagccccatgaggacctgtttgggtggtgatggttatttctgcagattctgtcattattggggaggtagacagcctggtgttggtttctgtggagatgtctagtgacactgtggactgatcagggccagggaaggatgtactgctagaggaagtgacatctgtcctggatacctcggtagtggcaccagtgagctctttgtaaggaacagtgcttgtctctgtggacgaggtgatctcctgggagatgctggtctccctcagtttaggagtcagggaggaagttgtctcagtctcagttcttgtagtcttagaggatttaggtattgatctggaaattgtggtgtcttccatggtggaggtggtaacatttggagatgtgactttagatggctctgggtaagctgagacagtagaatgtgattcaaatgctgaaccggtggtccccacattggtaactactgtgtttatggaaggatgcgttgtctctatatctgtggtggctgctgaagtgaccgatatgtcatccaaagtgttgctcatactttgaggtgaactggtcactgtttctaagcttgtatccaccttgcctgcggtctttaccagtgaagaagtaagaactgaggacatagaaacaggagaggaggtactgtgccattgcggtgtgaaagcaacagaagaaggtaaggttgtgacaaggacaggtgcttgagaagagggagagctggcttcatcctgaaagggagggtttgtctgtgacacgtccttgacatcattgttcattgcagtggttatttttgagtgggcaaacccctcagtcaccactgatggagtccctgctgaggtttccaaggttgatgtgtctaaggcaagtggaatctttgatgtagctccagaagaccctgtctgggtggtggtcatgtgggtagatattgtcatgggaggagagtttgaaagtctactgctggctactgagaaaatatctgggaactttgttgactgagcaggagttggtatgaatgttgcatcaaaagaggggacttccatttttgtggcttcagtaatagcccccacagacacattggagaggatgatgtttgactctgtagttgagttcatctcctggagggtgctgttctcttttcgtccagcagtcagggaggatgttggctctccctcaatgtctgtggtctcagaaccaggtattgatatagaagcaagagcgtcccccatgctggaggcaggaaccattggagatgtggctgtagatggttctgagctgactgggagagtggaatgcagtacatgtgctgaactggcagtccccatattggtcactgctttgtttatggaaggatgaatagtctctatatctgtggtggctgccaaagtggccagtatctcatttgatggattgttcaaattttgaggtgaattggtcacaggttccatgcttgtgttcaacatatctgtggtcttcaccagtccagaggtaagaactgaagtcgcagaaacaggagaggatgtatgttgcccttgtaacgtggaagtggcaggaggtatggttgtgaccaagaaaggtgtcagggaagagggatagctggtttctgccacagagggagggcttgtccaggacacatccttgggacctttgcttatgagagtggtcttctctgattgcataaaatctggagtcacagctaatggagtctctgtcaagtaaggcatggttgatgtgtccaagagatatggaccctgtgttgcagctccagtaggacctgtttgggtggtgatggtcactcctgaagattctgtcattatcagagaggtggaggggttggtgctcacatctgtaaatgtgttggtagaagttataaactgatgagggcttgagatggatgttccgctagagaaagtggcttgtgtcttggtgacatgagtagtagcatcaccactagacacatgggtaatgacagtgcttgtctctgtagcagagctggccacctgggatgtgcttctctcctgaagtccctggttcacagaggacactgtctcaatctctgtggtctcggaggagccaaatactgatgtggaagaagtgatgtcccccatgatgtgggaggtaaccaatggagatgtggctttggatggctttgtatggcctgggataggagaatattcagaactggttgcctccatattcgtcactgctgtgtctgcagaatgatgaattgcctttgtatctctggaggcttcataagtggataacgcctcacctgctgtactgctcaaattgggaggtaaacttgtgccaggttccaagcttatcctcgacatgtctgtggtcttccccaggccagaggtctcagacaagaaaactgaggtcacaggtggagtagaggagggactgtgcccttgtgatgtcaacaaaatattggaaggcgaggttgtagcatggataggtaccagggaagaggaagagctggtttcttccacagagggagggcttggctgtgatgtatcctcaggacctttgctaaagagagtggtcttctctgagtatgtaaatctctgagtcgtagccagtggagtccctgtccaggaggctgtggctgatgtatccaaagtaggtgcacttagtgatgtagcgccaggtggacttgtttgcatagcaaggatcattcctccagattctgtcatggcaggaaagttagacagcctggtgatggcttctgaggggctgtctgacgacctcatagactgggcaaggaatgagctggatattctcttagaggaggtaatttctgttctaggccccttggtgatcgcagtggaacctggggaagagataatacttgtttgtgtggttgagctggtgtccatgtaagggctgacgtccctcagttcaatagtcaagaaggaattaggctctgttctagcccttgtagactctggccatgtggttgttgacatagaaactattgcttgttccctggtggaggttgtaaccactggagatgtgagtttggatgacgctgagtgggctgggatagtggaatgagaagcatgttcggaacttgtgacccagcctgtggtctctactgtgtttgtagaagggtgaattgcctctttgtctgtggtggactcagaaggggcaattctctcatatgggctgcttttccaacttggggatgaagtcgtcccagattccaagtttatgtccagcgtattcagggtccttaatacactggaggagctggtaacctccttgatggtatcttctgagacagaattcatcatctcagtgatccaaggtgcacttggggttgatttttctttctcattccaggagtcagatgtagctcttgcctctgttgtaagagctgtctgcccttgtctctgaaaagttgcatctggagtttttgctgtgtgtgggatcacatccagagttgttgctgctgatctgggcacctgccctggatgtgcagaagtggtggtgggaagctgagtggaagtctgctctgcctttttgcttgtgggatctggtcttgaaaaagtaactccagagctccttgccattgcagctggtgtgactgcacttgtaatgtgccctatagagaagggcaactgtgaggtagctgggctgatcatggtttccaaagtgagttcctggggagttgtggccccctgaggagctgaggtagtggctgtggctgatgacagagatctcccagtgtcccagtcaagagtggacagagaatcaaacagaaaagtggacaggggcgtatttgggtcagtctttgtactagcatgatctgtagaaaccattgaaacaggcacatcttctgcttctgtactactgggagtccaacttgtacttaaaatgtcaggaactgagatgctcatcctctggacacgagaaaaagttgagatgggagtagatgcagttgtgtctgaaggactcaatgttctttcacttgtactggtctctgtctttacagctgaagcatcagaggatggagtgaccaggctggttccaatgacagttatacggccatggggagtagacatggagtctaattcagtgcttgaggctaagaatgaagttgtatgcattgtggaaattgttccaggagatcttgcaactttcaagtttgaagtcatgtctgtgacagtccaggaatctgatgcagctgtggaagaccaggtggaagggtgttctgtagaagttgtgcgcctctctgtggccggggtgctgtccatggtactcatacccacttctgggttgggtgtggtagttgagattgagttggttcccatggtggtgatggtggtggagatacctggagtaggagctgtggttacgtccaggatgctcacttccgcaggagatgaagtctgagatagatgcccagcagtaggggcaatgtcacttttcactgcacttacattggccctcagagtctcaagccctattgaaggagatgtgacagatgacgcagagcttgtttttcctcctgagggattggtgaggcttgtaatgccttggtctccagagggcagagacactagtgaggtggtttgtgctgtggaggtgatgtataatgtgtttgtgacatcaggagatgcaccaagggtgatgtcactcccagatgtctgatctgaccaagaactagttgatgaataagcctcatccacagatcgacttgtctgttgttcagctgccattatcttattattcaggacagtggagggaatggctgtggtgcttacccatgtctcggttttatgtttggatttatctgtcaatgagctcacagagtttgggctggttacagggtcttcaaggatattggaagatgtgctcagagagacatgtgtgtcccctgtggtccctccagtagagccatgccacatagagaattccattccagttgtctttgaaaccagttctggactgctttgctgaccagtccctgtgatgcttctagcagttggtgactctagggagacagaggacattgtggccagtgactgcctggtccctcctggagttccagaataaaggttggtccaagcctcaggtggggatggggagagggagaccctttctgtagccaacatattttctgttggtgacttggttggtgatgtggttcctgtgggcaggtgagagatgctggtgctgccacttcctagggctgtggactgaagggtgactggttccactgtggtctccatgggaacagttgtttctggagtcttccaaggagaatttctcacagtggacctgatctctgggctgatgctgggttccttggagctcatgattttgagagtggtagacatttctgggcttcctggggatgtgcctgtgattagaaagtaagtcagtggagtatatgcaaatggtacagaagatgaagttttttggtttgacactatcattcatttcctcccgggatttcaattaaaactatttcctccttctctgggaaagaaaatgttgagcttttaattctcacactttaagcctctggacaccagggaacacattaaacattccaagggagatggtgaagttagagctttgaccatctggcttgctcaggagaaattatcacctttagctcagtttttccccatgccccatataaaagggctctttgcataagggaggatgtgatgaaccaggacttcacccatgcaagaggctacccccaaactatttccacttttgtctttggagcttgcccttgccaaaccaatttcagcttccaactttcagcctcctctaggttcccccaaatcttagttcactgcaaagctacttaaggatttgagaagaaagaggataagggagatgagctcattctttctcgtcaccttcattttctttcaaattcattcctccctctgaatcctttccctgtccttcaggaaaataacatctacctgtcaaaggagtgagaaaaatgtgacatcccaagagcactcctagggaccatatttcacatttttctaagcaatttggcactgccaaggacttcagcccataatcccttcttccgtagtaacaaacgcaacatttgccatctcaggttcacctaggccctccctgtgaacacagtgatggtctctgatttagaaagatccttcactctggagcagaagaaagtacagaaagaatcgactctgtagcattctctcctgctgaattaattggctattgatcatgtaaattagtaagttgaagcaacagaagtgttcaattagtaacatctattggggaaaaatgatcaatatcctcagagaagagtgtcaagaagtcaaaggaactttttttttttttagatggagtcttgctctgtcacccaggctggagagcaatggcgtgatctcggctcactgcaacctccgcctcccaggttcaagtgattctccttcctcagcctcccaagtagctgggattacaggtgtgtgccactatgcccagctaattttttgtatttttagtagagacagggtttcactatgttggccaggctggtctcaaactcctgacctcgtgatccgcccaccttagcctcccaaagtgctgggattacgggcgtaagccaccacacccagcctaggaacctattttaaaacctagtccttgctgggtgtggtggctcaagcctgtaatcccagtgcttagggaggccgaggtaggtgaatcacttgagtccaggagtttgagaccagcccaagcaatatagtgagaactatctctacaaaaaatttaagaaatacacacacaattaaccaggctaattggtgatgatcacctgcagttctagctgttgggggaggctgaagttggaggattgcttgagactgaggaggctgaggctgcagtgaaccatgaacacgccattgcactccagcctgggcaacagagggagaccctgtttcaaaaaaaaaatgcggtctaggctgggcacagtggctcacacctgtaatccctgcactttgggaggctgaggtgggaggatctcttggagccaggagtttaagaccaccttgggccacatagtgagaccccatctgtacaaaaaaaaaaatttaaaaaaacaacaacaataagctgggcatagcacagaggctctagagcccagtgagtgagctggactgctgcccagctactcaggaggctgaggtgagaggatagcttgagcccaggaatttgaggctgcagtgagtacagtgagtactgcagtaaatatacaccactgtactccagcctgggtgacagaatgagaccatgtctcaaaaataaatgaaagagagagagagagaaagaagagaagagaaggagaggagagagaaagagagagagagagagagagaagagaaggagaggagagaaagagaggaagagagaaagagagaaagaaaggaaaagttgctagcatttacttataaaataatgaaactgaagccttgtatattttttcttcccagaatcaataagcagcacttttagtcagcagcaagctgtcctcccaccttggcctctcgagtagcagggactacaggcctgcacgatgcccaacttattttttttaaaaaaaatttttttatagaggtggggtctcactatctggtccaaattggccttaaggcttgggtgaaaaaaattaagtaaaaaaataaaaaatttaaaaagaacaagagaaagaaagaaagagagagagagaaagaagaaagaaagagaaagaaagaaagaaagaaagaaagaaagaaagagaaagaaagaaagaaagaaagaaagaaagaaagaaagaaagaaagaaagaaagggagagaaagaaaagaaaagaaaagaaaagaaaagaaaagaaaagaaaagaaaagaaaagaaaggcttgggtggcattagcagagcagaaatggaaacaaggtctatatttacctgctggactgctccccgtctcctctgctggggcaggccacgtggaatttccttgtgctgcctggcttgacatctttatggtggtcactagcgttccatcagttgctgaaagaaaagggcaataggaaggtttagctatccattacttcagaatgtcagtttttgagctttctttacattgactgatctttctattttgcttcaactcagaggctctagagcccagtgagtgagctggacagctgcccaggtgacctcccatcaaacactagtctaacaggacatggtagaaagcagacaccaggcaccgtcaccagaaagactgacagatctcagatgggaaggggttcattttataagtaatcacaaattaaaatgtgacaagtggccaggcacagtggcttgcccctgtaatctcaacactttgggaggtcaaagtgggaggattgcctgagcccaggagtttgagaccagcctgggtaggatagtgagacaccatctctacaaaataatttttaaaactagctgggcatggtgatgtgcacctgtagtcccagctcctctggaggatgaagcaggagaattgcttgtgcccaagagttcagggttgcaatgagctatgatcactccactgtactccagcctggatgacagagtgagactgtctctttaaaaataaatgaaataaaatggagtaatattctgtttagagcatggattcttaacctctttttattataggtccctttgacaggcttgtgaaccatatgaattcctttataaattaaaataaaaatatagaataaaacataaaataacaatataaaatattagattacaaaggaaatcattgtggataaagaaaatctggtacacatacacctcggagtactatgcagccataaaaaagaatgaaatcatgttctttaaagcaacgtggctggagctgaaggccatcaacctaagcaaaataactcaaaaacagaaaattaaatactgcacattctcacttataagtgggagctaaccaatgggtacatgtggacataaagatagaaataatagacactgggactccaaaatagaggaggctgggagtgaagtgaggattgaaaaactacttattgggcacaacattcactatttggctgatgggttcactagaagccaaacctcatcattatgcagtatatccacgtaacaaacctgcacatatacccctgaatctaaaatttaaaaaacaaaggaaatgattatattgaaatgttgttatcaagatcttaataaacaaatgtaatacaataatacaggcacttattttactaactcattaaataagatctattgaaaagcctaataaccactataattatgaataaagtcgtacatgatttttaaaagtgcttgcaacaattgtcataggatatgaaagtgtccggaatttctgttgttggcaaaggcacaggcactgctaggattaatgtggtttgttttgttacctctattcatcaataaaacaaatgctaaatttcagttcgaggttagcaaaaataaagatgtagtttacaaataccgcatgttctcactcataagtgggaattaaaccttgagtacacatggagacatgtgaattgagggtggaggctgggaggagggagaggattaaaaaaaatctactgatcaggtactaggcttattacctggctgatgatgtaatctgtaccccaagcccccatgacatgcaatttacctatataacaaacctgcacatgttccctgaacctaaaatatttatattttcaaatataaaagtttaaaaaataaaaaagatgtagtttatttccagattcatccccagcacacttggggaaggagcagggcattcttactttcaaccaaggaggtcttggcaggaactgaaatagagcttgcccatgtttctggagaactctttcttctggctgtgggttctgtgggagaagagacaggtaacaaggatgttggggtctcagatggtgtgaaggttaacgtctgtgtttcagctgttgttccctcttcttctgcaatggtctggcttgaggttaactcaggaggctcctcctgggacatatttagagtggatgttggagaaagtgtcagagctgaagtctgaagatgcaccaatatgttgggctgccttgccatggaaggcccaagaaatagtgaagtctttctggaggtggatgcagtgggggaaaggaagcttgtttctttctcagtggataggcttatgggagaggaactagaaccagaccttgctgcttgacctgtgctgaagagagttgtgagttttgatgcaagagaggtcgatgtcatagctgatgatgccttgcttgggtctggataagacatgctctctgaggcatatctagggtcccctgttcctgaagtggggactctgggttcatgccctgccatagaaggggaggcagatccctcaggggtttcagtaaaacctgttgattgaaatgagcttgcacttatggcctttgtggaagtcatcatccttgcccttgggtttttttctggagacttggacagtgaggaagatgctgtgcttgcatctgagtctggaatggtgttcagggactgtccaggagttggtaaagaagcggacttagtatccaaacttgggacctcagaaaactcaaatgtcaaggtagactgtgggatcccccaagttgggggagctgtagtcagtgaggcaaaggcctttgatgggcttgaggaggcagagacaggtgttaggaggcctgactcagcactggtgggcttcacaggtatccctttgggtgctgttgattgagtagctgtcagtctgttcgtggtgatttcagacatggctgtaacctcacctgggttcatggtcagagggagagaagaaaatgttttggttccagttgagtgagtggacccacttctgattcctccagagctagccataccctggcttcctgtggttagtggcatcacagatgccctctcaagcccagctgatgagtctaccaaagccgttgtctctgagttttcagaactctgactgaatacaagggaaccagtagttcccgcaggcaaagtagaaagtgccactgtgatcgaaccttcataggttgtattccgtggagcaacaatcttagagggggaagtggaagaaggatggagtggactttctgttactccttggatagtgattccagggatgctcctatctgggttacttactgtcttaagaaccagtgcatcaccatttgaggtctctgacatggtcagggtagtctctgggactgtgccaagactatccgaagctatagtcaccagtggggtggaatcaaaggatgtagctaatgaacttgttggctcagtggcagtgagagggatggctggagtgtccgggagtaaagtagggaaggaagctccagacagagtccccgtacttggaaatttagaaggtggcgtggacacagttgaaaacaagatggtatctgtgaccaaaatctttgaggtaagtgttgtgtctgaagtctcagtgactaccaaaaggctctcaggagtagctgaagtttcccagtttgctccagaggtgggtgtagttggggtctgtggtgaagaatgaatggctttgctttcactcgtagtgagaagactggcttctgatgtagcactggatccagtgaccactgctgctgagagatggggagtgaaggcagtggctggttcaatagttgatgctagaagtgagtgtgcctctcctgcaggacttgtcttgagaaagcccatggcaggtaagtcagtagtactgcctacactggtccatgtacctggtgctggaacagaagtcaccacagaattgctagaggtaggattttctccggaggcagtgtcagtgctgaccatggtgctgaaagttcttactggtctagaccaggctaatagggccgagcttgtctcgacagggtgggtgattgtaaagggtggtaaagtggatggagtgccacccacattggagcccccatcaagagaataggtgttactggaaacagatggagaggtggctgtatttgtctctgttgtagatgtgggaacctggggtctatctgaagagaagagagatggggaggaacttgctgtcattcctgagatgctagtgggactgatggaggctgttttagtgacatccatagttgaagaagctatggaggtgttgatcagatcagaagaagaactgctatctgaggggagctcatttgttttccgtgcgtcaaggatatctgaggtttttactgtagtttcattatccagtgaaactgtgctggtctctgtgaaactagcagtgagaactatgggggaagtggttggagcagcagaggtgattgtccttctctctcccagtgtaatggagggactggctcctgtgggctttgtagacatagctgaactcatccaatccccaggaataggtgtcactcttgaagtcaactcatgagtgagagatgaaatggttctaaatgaatgagttgtcttttctgggaaatgtgagatagttgtcacttcagtatcaggggagggggaaaaggagacagtgggaatactctcagccccatctgaaggtgtgtcaattacatctgatgctactgtggacaagccaggtggacctgcgctgtttactgggatgcttgtttctgtattagtagttggatgggaccccaaagggattgacactgtccatggatccttgttcattctaaaggaaaccaaagactctgaagtgggcagggatattgtcctagttaatttggtccctgctgaagaggctgtgcctaaactcgggttagcagtactctcagatgtaaggccagaaacatctgatctagaagttatggccattggaagagggacttcagagctgatacttgcccccacaggagtctcagaaagacctgtgaccgaggatgcatcagtgttcaaagtactcgcggctgtattctggggaccatgggtctctgtttctggatttctttgcttagcagcagatgtggatgcagctgaaaagagtggaaattcagtcgtagttgaacttgggtttgaaaccccagaatggcctgaggacagtgcctcagataaactagtacttggccaagttgtagtggggagagatgtagtgaggtcccatagccaggaagtgattgcattcctcctactgattgtggaatccaaggattcaagtgaggctgaggaatatggagaggatgtgctgcttccagaagagactgaattctcatgggtaggggaagcagacactgccacagagttgacatatggagttgactgtgtctgcacagaaactttttctgaagaaactgcatgtagtggttgagtggactgttcaattgtgcctgtactggtccatacaattgttggtggggtgatgggagaatgtgtcatgggtgctgagttgatgtctggtcctgaggttatgcctgtagaaatgacttcttccactggaatggatgaaaaaggcaatgttaagcttatggccctgtttccaggagtggaagtcaaagtggtctctgctccaggagctgaggtctcaggtcggggatggattgaagaagacacttcactcttctctgtgtaagtcatggaagtgtgagtgctgtttcccatagacagggacttagaagaggtatcagagccgttttccaatctggaggctctagtgacaccagtattcaatgacctgtcagtggccaaagtccctgcagagctggtgtgcaccccatggctgaggtcaagtgaatctgtggtattgggggcattactgagagtgagagaaatccatggtgtcacctccattgatggagttggagatggaagatccatagaggcagttctgagtttttcttttcctgtattttcagtgcttcccaaagctgtggacataagggtagctgagctggactctgtccttgctgaagacttggagatgtctgaggtcataactgtggtgacctccttggtccaaaatgtgctgccccctatgaattccacatcaggagttgtaggagatgaggttagagggatgcttgtgctcatctggcttccttcagcatagctgggttcaagagaggaggagagagctgtatttccctgtgtgttcagccttgggctgcttcccttactagaatctgtgactccttcagtagttgactcagaaaggacagaggaaactcttcctaatgactggctgatgcttcttcctggagcactagtaacaaggagtcccattgtcccagccatagagacagtggctgtagaacttcttctttccagtgccatgtttgtggatgtctcagctggggaggatgttcctatgggaaggtgggctatgcccagggtgactccactactactgctccctgttgttgtgttgtccatgggtggagtggattgaatgtttgttgggccagtctcaatctctctggacagtgtgtctgtagatggtttccaaaaagtggttgcctcagaggagcttctcccttgtgtcccgagctcagggtagacttcagtaagatgggaaggggatgctgaggctggtatagatgtttgatctttgagtgactgtgtcacgtgagtaggactcatcgttgcagaaagggtgtcctgtgcttgtgttgagtgttcaatcacactggtccacgtggttgtcagtggggtgataggaacagttgttaagtccccagttctgcccaaactcctgattcctaggtgctgatccaacgttgttgaatctgtatttctaatggcactggtatctgcctctgactttgaaagttcatgagaaggtgtggacataggtggaaaaatagcaaatgtactcatgggtgaacttggacttgaaatatcaaggtctgttgaagccatttcctctgtcaaactggtactcagccatgttgccatggggagagtgattgtggtctgctcactgggagcaaggaccaggggttcccctgggacatcagaagttagttccaatgtgctgcttccaatggtaggggaggtagggattactacagagacaggtcctggagctgactgtgtctcaaatccagatgatttttctgccaattttgtgtaatgtaattgagtggagtgttcagttgtgtctgtgatggtccatgcttttgtggccggactggtgagattgggtgaacttgagattttaggacttccagagtaagcagctggggtggcggactctgtctttggatggttttctgtggttctgagtgtcctcactgagtggggtgtagagacctgagctgaacttgtatccttaggatccgtagtggtgatgtaggtggtggggtcccaggtactaccagtgttagtctctccaggagctgtcatctcaggtgaagacccagaagagtaagccattctggctgttgatacatgaatgtgggtctctattgaggggaaggtgagaggtgtgtaagagccaggttttactactgaagccatggtaagtttgatggtgcttggactttctgaactagcgtgtgctccgaggtggatgctgggtgtgtttgttgattcagggtaggtgctgagggttggaagtcccccttctgatgcctccaatgatgtggctggagatggagtgtccaagggaaccagggtgctttttcctatggcaccacttgttggaatattacttggtgtcaaggaagtcgtggaaggtaagttgggcatgttccaccgactagtttcaactgtgtccattatcatgcttgtggtgactctctgagttgaaaatgtggagctcattgtgactttgggagtaggagaagaaggagatgaggacaagatgccaagccaggtgcttctagcagagccaggatcaggagatggagggtgagttgcagtcatttgtggagtcagagctgagcttgttccatctctaggtattgtaatttctctggatgttaaatgatagacatcatcagaaaatgtgtcaacgaattggcttgtccttcctggagtgcttgagccagcagcatccatggactgagatggagatactgacattgagacactttctttggccatggtaaaatccatagatgtctcagaggaagctgtggttccaatgggcagatggcttgtgtccaatcttccttcagtaatgtagccctttccaattgggatgttggtagaagccacagccatagagcctgggccattcgtggtctctgttgtgaggatggttgttgatggttccctgatagaagttgcttccatggaactagttgctggagaagtgaatttagagaccattacagtagcagagagagaagtggcagaggttgaaacagtggttgttgctgaaggtaaccctgtcttgaatctgggactagtctctggccaagttgtgctttggggtgcagcagagtcattaaacgtgtctctattggtctgtgacattgttgccgtcccagtgaggtgagatattttaggaagagctgaaccagttgagtttgtaactgaggtactgctcgtagctctgagctcactcactaggtgggatgaagagaactgagctgaacgtgtaggccaggtgtccatggtggggaatactggggtagggacagaggtgctggccaaggtggtccttactctggaaacagaagtctcaggttgagacacagatggattcgaagtttcctctgtttcttctccactagtaaatagatgagtggaaggagtagatgaagaaaatgtggttttgactccagagacacttgggaggctgagagtgctaggactctctgacgattctgaagtcagtgtcccagttgggtggatgttaggtgagtctgtagtctcagcagaggtgctgagagtgaggacactccctgctgtctcttcccctgatggagatggatgagtcagaggggaagttgcatttctgactctttcaggacttgttgctgcattgcttagggtcatggaggaaagaacggctgagctgggctttgtctttgttgagatttcaggagtccctgtggtaatagatgaggtggctttgtggtgtgagaatgtgctggtcgctgacactttatcctcaagaactgaagcagatgacaacagaggaatgctggtgcttatcttggtgtgtcctgcagagtctggttcaggggaagagaagggatgtctagtgtttaatggagtcagtcccaggctggttccttccctgaaagctgaggactgtagagatgatgtctcagggatgacagaagaaaccattgtatatgatggctttgtccctcctggaggacttgagccagcagccgtcttgctcactgctggagacacggagactgggacaccgttcgtggccagagtcaaatctgcggatgtctcagatgatgctgtggctctggtgagtaggtgggttgtgccctggcttcccctggtgctgctgcctcctgtcattgaaatcccagtgggaacagcaaactgatgggtggttgggccagctgtggattctccgatgagtgtgtctgcagatgtttcttcaagccaaatcccttttgtggagctggtcttcagggtggtgaagccagagaccactgagggaacagaagtggtgataggggctgccacactggttgatgctgggggtctctctgttttcatgctaggacttgtctccacccactgtgtgtgctggggttcactaaattgctgagctgtgctttcactggtccatgatgatgcttttgaggtgctggaagtggttgccctcaggatgtcagagctcccgtgggcagctgtgctggaactctgcctcccagaggtgctgcctgtggttctgagctctcttgttgggtgggatgaagagacctgagatggacttctgatcttgctgtcaagagttgtaaaacctagagtggggaccaaggtggcagtcatttcggactcttctccaggagcagaggtctcaagtggagtcatagatgtattcaaagttccttctgtttcctttccactcgtggagtgatgggtgttggtctcctctgagactaaagtggtagatggagatgtggttgtcagcgctgaagtgctggtgccaccaagggtacctggacttcccaaccattctgaagccaaagtcttggctatgtgggtgctgggtatatccatggtctcagcgaaggcatggaaggtaaggatagtctctgctgtctgctttgtggatattgatggagtccccagagaggaaattgtgcttctgaccctttcggcacttgtttctgcattgcttagtgtcatggaaaaagggatagctgagttgggcattgtgctggctctggcctcgggcaccccaggagacagaggggaggtgagactctggcctgagaatatgctggtctctgatattttattatcgagaactgaagcagatgatgacaaaggcgcactggtacttattctgctgtgtcctgcagagccaggttcaggagaggagaagggatatccagtggttgatagaatcagttccaggcttgtttcacctctggaatttggggtccctttaggtgataggtcaaggaaggaagaataaagtgtcccaaatgatgggtttgtccttcctggagtatgtgagtcagtaactgtggtctcagctggagtcatagacactggggcattttccttggatgcagttgaatctgcaaatgttttcattggagatgtgatttttacaggaatatatcttgtgtcccagggggtctctgtgctgtcaccttcagttgttgaggtctcagtggggactgtgtacttctcagtgactgggccacttgtggtctctacagtgagtgtgtatgtagatgcttctttggtaaaatttccttctgtggaactggtcctggtccttggggaactcaatcctgaaaccatgcttgtagcagggtagttcctagagggagttccattgacctggggactcagcgatgggctggttctttgctcggagtgtgtcattcctctagaggttgactcagggagagcagaggacatcacccccaaagactgggtggttcttcccacaaccgaagatgtaggactggccaaggtcttatctggggaagtaaagggcagagtatgttctgtcaccacgattgcacctgtagatgtcttaggtgacaaggtggctcctgtcagtcctgaatccatttctggtgtggctttagtgctcctgctccctgtcatcaaggagcgggtgggagaagatgacccaggaaggcctgagggtttcagcatggacaggtcaacatttgcctctggatggaggtctaagaagaatcccctcagagagggtggcctctgcagagcttctgagctccctgaaactccaaaatttctcagggtgggagatatggctggggtccccgcatttgacctgggaaaacctgtgtctagaagagctgccgtatgtatggaggttgggggaattgtgcaacgcttctaattgagaagaccaaatctcagggagagaaaggaaaggatagttcaaccacagacaatttcctcaaataaacacctgatgatctcaattcttcccttcaaactttttaacggattctcagtgtctgcagaatagaatttcttagtgtatcatgtcttaatgatcctctctctctctctctctctgagtgtgtgagtgtgtgtgtgtgtgtgtgtgtgtgtgtgtgatgtcttagaaaccaggaaccaggctgggcacggtggctcatgcctgtaatcccagcactttgggaggtgaggtgggaggatcacctgaggttgggagtttgagatcagcctgaccaacatggagaaaccccgtctctactaaaaatacaaaattatttttaattttttaaaaataattttaaaaaaaattttaataaaaataaatattgggtgtggtggcatgtgtctgtaatcccagctacttaggaggctgaggcaggagaatcacttgaccctaggaggcagatgttgcagtaagccaaggtcacaccactgcactccagcatgggtaataagagctctgtctcaaaaagaaagagaaagaaagaaaagaaaggaaggaaggaaggaaggaaggaaggaaggaaggaaggaagaaagaaagaaagaaagaaagaaagaaagaaagaaagaaagaaagaaagaaaggaaggaaggaaggaaggaaggaaggaagggagggagagaaagagaaagaaggaaggaaggaaggaaaaaaagaaagaaagagaaagaaagagaaaggaaggaaggagggagggagggaaggaagagagaaagaaagaaagaaggaaagaaagaaagagagaaagagagagggagggagggaggaagggaggaaggaagaaagaaaaggaaagaaagagaggaccgagggagtgaggaagggaggaagggaaagaaagaaaaaaagaaagaaagatgcagatagagcccctacctacacccccatgagatggagctaatgctcagtgtgtgatactggcagatactaaggctcttgaattgagaagtggaggtcagagaagacacggcacttctgttcagatcagagcaggggcccacagatgcactctcaggaatcagtggaagttgctcttgattaaaatctcatgaccctggcctgctgggcgtggtgtctcatgcctgtaatcccagcattttgggaggctgaggtgggcagatcacgaggtcaagagatggagaccatcctggctaatatggtgaaaccccatctctactaaaaatacaaaaaattagctgggtgtggtggcgcccacctgtaatcccagctactcaggaggctgaggcaggagaatcgcttgaacccgggaggcggaggttgcagtgagccaagatcacaccactgcacttcagcctgggcgacagagccagagtctgtcccaagaaaataataaataaataaataaaatttcatgacccagagggtgaagaagatgaggttgaatcatgtaaaggtctagcgatgctgatttaggacagaagaggaaaaaaaaaagaatttcctggcagctcactatctctggctgtttttgttgagggaaaagtgcagggaagatttttcactttgggcattactatgatttgaatgtcccctccaaaactctgttgaaacttaatccccagtgtggcagtattgagaggtggggcctttaagaggtgattgggtgatgagggctctgtccgtatgaatagattaatccattcatgactaacccatggattagtgggctaacatgggaagggacttggtggctttaaaagaagctttaggccatgcatggtggctcatgcttgtaatcccagcactttgggaggctgaggtgggtggattacttgaagtcaggaattcgagaccagcctggccaacatggtgaaaccatgtctctacaaaaaaatacaaaaattagccagacatagtggtgcgcacctgtggtcccagctactcaggaggctaagagaggaaaatcacttgaacccaggaggtggaggttgcagtgagccaagatcgcagcactgcactccatcctgggtgacagattgagactccatctcaaacaaaaaaagaaaagaaaagctttaaaataggaagtgagacctgtgctatcacattagcgcactcagctgtcttgacgtgtgatgccctgtctacctctggatgccacagagtccccaccagcaacagggctctcaccaggtgtgcccctctggatttcaactttccagcctccatatctgtaatagatacattatttttctttgtaaattacccagtttcagctgttctgctataagcaatgcaatacagactaagataggcatggctcatggatttctctcaagatgaggcccaccttggttctaagctgcgtctcctaggaattgagtttttccctaggccggtggggtaagtgaaactataattcattcctcatgctttcccaatcttcttttctactcaggagctaccaattttatccaggtcaaaatgattgaagaaccacgtcctttgcccactgtgtaatgtttcttttgtttgtttgttttgttttttgctggttttttaaattataaattcgtttattttttattttttattttttttgagatggagtctcactctgtcacccaggctggagtgcagtggtgcaatctcggctcactgcaacctccaccttccgggttcaagcgattcttctgcctcagcccctggagtagctggaattacaggcatgtgccaccatgcccggctaatttttgtatttttagtagagattggctttctccatgttgggcaggctggtctcgaactcccaacctcaggtgatccgccaaagtgctgggattacaggtgtgagccaccacacccggcacgtttcttttagatgctggatattagacctttgtcagatgcaaagtttgtaaagcttttctcccattctgtagattgtctgtttactctgttgatagtttcctttactgtgcggaagctctttagtttaattaagggcctattggagggtggagggtgggaggagggagaagatcaggaaaaataactaatggatactaggcttaatacctgggtgatgaaataatctgtaaaaccaaccccaatggcaaaagtttacctatataacaagcctgcacatgtacccctaaacttaaaataaaagctaaattttaaaaaagaaaataaaagtcttctgatcccaaataaaacaacttagatgcaaaaaagtgctataagacatatacattattagctcactcttcttctgaactaagagttcctgctgggcgcagtggctcacgcctgtaatcccagcactttgggaggccaaagcgggcggatcacctgaggtcaggagttcaagaccagcctggccaacatggttaaaccccgtctctactaaaaatacaaaaactagctgggcgtggtggcgggtggctgtaattccagctactccggaggctgagacaggagaatcacttgaacctgggaggcggaggttacagtgagccaagatcgcaccattgcactccagcctgggagacaaagagcagaattccatctaaaaaaaaaaaaaaaaaaaaaaatccttccaagagagtcctgaggagagcagattacttgaggtcaggagttcaagaccagcctgaccaacatggtgaaactccgtctctaccaaaaaatacaaaaattagccgggggtggtggcaggcgcctgtaatcccagctactcaggaggctgagacaccaaaattgcttaaactcgggaggcaggggttgcagtcagctgagattgtgccactgcactccagcctgggtgacagaatgagactctgtctcaaaaaaaaaaaaaaaaatcaggggttataggctgggcttcctgtcccccaactactctggattagaatctcaaaacaagataaagattagaattgcatacttgtacatggtcataaagctggaggttaaataaaaagttagggagccctgtagctggggagcaaactccaacacaggcgtcccttgcacttcccctatggaaaagatcaaaaatgttcgtcttcaaagagattaacaaagctccgggagaccataacaatgtggaggagatgagattggagcatacctgcaggactgattgttgatttttctaccagagggctgcctgttggccatactgaggttccatgtggggatgacgaattctccccaggctcgtgagttcctgtgaggagaaaaggatggaaagagcacctaagtaaggaagctcagaacagggcatgatggttcacacctgtaatcccagcactttgggatgctgagcagtaggatcacttgaggccaggggttcaaatccagcctgggcaatatagaaagaccccatctttacaaaacaatttagaaaattaaccaggcgtggtggtgcttgcctgtagttccagctactcgcgaggctgatgttggaggaccacttgaaccaaaaattagccaggagtggtggcacgttcctgtaatcccagctacttgggaggctgaggtaggataattgcttgaacccagaaggcggaggttgcagtgagccgaggtcatgccactgcactccagcctgggcgacagagcgagactcggcctcaaaaaaaaaaaaagaaagaaagaaagaaagcatgatttgtagaccaaaaaggaattggggaattggggatgacagtaggtgaggcattccaggttaaataatggctttgacccaagtaagacatgagaacatgatacaatgggagtccttctaccatcttcacagattgttttgcaagtagagcatcagcatgggtggaagtagctacaccgtctacattgcattgactcaggaatggcacaggagactgtcctcaatgactgaatcactgagccaggagtagctgtggtctcagctgggagaatccatactcatggctgtattcatgactttaggaggctgctgttgtgaatcatctggatccactatgtggtgtggctgttgtggattttgcaaattctgctctgggtagacgtggcctggagggcagtggaggtggctgttgtccccatggtgatgattgctgttgacatctaccttgcaaaggtcgcctcagtgatgctatttgttgggcaatgctgggctcattggttcctctggtgacgacaggctttctggtgctttgggcagccaggctgtcactgatgtcacacctttgggatgttcctttgagtacagaatgtgctctgatctttccctgttgcatcgctctcttgtctactgggtcaaaacattagcagagaagatgctacatgcaggtgttatgtggagtgccttggtcctcaccacaacctggggagacaagtgctatccttcccattttacagctgaagaaactgaagtctaaggaggtgaaatgacaagcctcaggtcccagaaccaggaagtggcagagttaggattttctttagagagttaacaatatatatatatattttttttttttttttgagacggagtcttgctctgttgctcaggctgaagtgcagtggtgtgatctcagctcactgcaacctctgccttttgggttcaagcaattctcctgcctcagcctcccgagtagctggaactacaggcatgtgccactatgcctggctaattttcgtatttttagtaaagacggggtttcaccatgctggccaggctggtctcaaactcctgacctcaggtgatctgctgcctcggcctccttggattacaagcatgagccattgcacctggccgagttaacagtattttctttagagagttaacaatgtttttaaagtaaagttaacaatatttaaacaccatgatataaagttaatatgttgctttagagatggggtcttgctctgttgcccagactggagtgcagtggtacgatcttagctcactgtagcctcgaactcctgggctcaagtaatccttctgcctcagcctctcaagtagctgggactacaggtgggtgccactatgcccagagaatttttttttaatttttagtagagttgaagtttcactatgttgtccagactggtctcaaactcctggcctcaagtgatccttctgcctcagcctcccaaagcactgggattacaggcactagccaccacacaccacacacagccagagttaggatttattattttattttatttatttatttatttatttattttgacatggagtccttttctgtcgcccaggcaggagtgcagtggcatgatctcggctcactgcaacctccgcctcctgggttcaagtaattctcttgcctcagcctcccaagtagctgggattacaggcacgcacaaccatacctggctaattgttttgttttgttttgttttgttttgttttgttttgttttgttttgtttgagatggactctcactctgtcgcctaggctggaatgcagtggcgggatctcggctcactgcaagctccacctcccggcttcacgccattctcctgcctcagcctcccaagtagctgggactacaggtgcctgccaccacgcccggctattttttttttttttttttttttttttttggtatttttagtagagacagggtttcaccgtgttagccagggtggtctcgatctcctgacctcgtgatccgcccgcctcagcctcccaaagtgctgggattacaggcgtgagccactgcgcccagcctaatttttgtatttttaatagagacggggtttcgccacgttagccaggctggtctcgaattcctgacctcaggtgatccgcccgcttcggcctcccaaagtgctgggattacaggcctgggccactgcgcttggcccagaattagaatttaaccagtagtttttgtagatgctacaccccgcgaggaagacacaagtgccccctgctggccaatccttttagtttatcttcttgtatgtatcagatttagttattatttacgtagctaaaagaatctcgggtctatttggttactttggttacctaatacttgacctatttggaaatagaaaaggatgtttcctgtttgtttagaggcattccaaaggttctacagacagtgatatttcactacctagtcatagccttgtccatgtcaagtagttcgggtgctttcttaccttgggtcctcacacattcttagttcttagctgaatcttctatttttgaaacagggtcttgctctgtcacccaggctggagggcagaggtgtgatcgtagctcactgcagccccgatctcttgggctcaagcaatcctcccgcctcggcctcctgagtagctgggactacaggcatgcaccaccatgcctggctaattttttctttttttaattgtagagatgcagtcttgtcatgttgcctaaagtgatctccaactcctgggctcaagcaatcctccctcctcagcttcccaaagtgttgggattacgggtgtcagccaccacgccagacctcagctaaatcttttctatctttgaaaatgctacagtacccgatgtttcctagaatttagatggcaagctgtgtcatagggacatctcgtgcaggaggggaaaagggtgaaggcatgacgcattgctgaacaagactagtagtaatacttagttggcggggggggcgggtcttgaaatttatggccgggcgtggtggcccacacctgtaatcccagcactttggggggccgaggtgggtggatcacctgaggtcaggagttcaagaccagcctgaccaacatggagaaaccccatctctactaaaaatacaaaattagccggatgtggtggcacatgcctgtaatcccagctactctggaggctgaggcaggagaatcgcttgaacccgggaggtggagtttgcggtgagccgagatcaagccattgcactccagcctgggcaacaagagtgaaactccgtctcaaaaaaataaataaataaaaattaaaaaataaatttggaaagccattcccaagggcatgtagccctagatgattttccagggagtctgaaaagcaatacttacgaagacagttagtcaatttgtaaccttagcattgactaggaacaagtagagcttgaaagggcagctgaggctgggcgcggtggctcaagcctataatcccagcactttgggaggccgaggcgggcggatcacgaggtcaggagatcgagaccacggtgaaaccccgtcttcactacaaatacaaaaaattagctgggcgcggtggcgggcgcctgtagtcccagctgctcaggaggctgaggcaggagaatggcgtgaactctggaggcagagcttgcagtgagccaagactgcgccactgcactccagcctgggcgacagagcgagactcagtcagtctccaaaaaaaaaaaagaaaagaaaagaaacgaaaagaaaagaaaagggcagctgaacccctggagaggcagagaatggggcacttctgtcaatcagcaccacagtggtagatgtctctgccccagttcctgtgggtaggtgggctgtgtgtgtatggagtcaggattgttgttctctagttcgaggaactgaatgggagataggaaggactatgctccccattgcccctccccagcccccagcacccattattctgctttctgtctttatgaatgtgatgactctaggaacctcacataagtgggatcatacagaatgtgtccttttgtgactgccttatttcacttagcacactgtcctcaacgttcacccacattgtagcatgtgtcacaatgtccttcctttttaaggctgaataatattccattgtgggggccaggagtggtggctcacgcctgtaatcccagcactttgggaagccaaggcaggcggatcacttgaggtcagcagttcgataccagcctggccaacatggtgaaagcccgtctctcctaaaaatacaaaaattaggctgggcacggtggctcacgcctgtaatcccagcattttgggaggccaatgccggcggatcacctgaggtcaggagttcaagaccagcctggccaacatggtgaaactctgtctctataaaaatacaaaaataagccgagcatggtggcaggcacctgtaaccccagctactcagaaggctgagacaggagaattgcttgaacccaggaggtggagattgcagtgagccaagatctcgccattgcaccctagcctgggcaacagagcgagactctgtctcaaaaaagaaaaaaatacatatatatgttatatatatatatgcaaaaactagctgggcgtggtggtgccctataatcccagctactcaggaggctaagatgggaggattgcttgaagccaggaggcggaggttgcagtgaactgagatcacgccattgtactccagcctgggcgacagagtgagactccatctcaaaaaaaaaaaaaaagaaagaaaaaaaaattccattgtggggatggaatatatttttttaatccattaatctgccaaaggacatttggatggtttctacatttggggcattgtaaataatgctgctatgagcaccggtgtataaatacctgcttgagtctctgttctgctttcaattcttttcaatatatacccagaagtggtgttgctggattatctggtaattctatttctaattttttttttaggaagcatcatactcttttccacagttggggcaccatttagactcccacccgcggtgcacaagtgttctaatttctgcacatcctcagcctcatttgttataatatttttatgttttcctgtgttgttttgtttgtttttgtagcagccacctaaacggatgtgaagcttacagtgctcacatggtgaataatctctccctccttcagcagtcacacttaactaattaatgtaagttgcatcctcataggatgcacattaaaacaattccagctttcaccagggttaggaagaggggctttgctttgtgtcactggcacccaccctcctatttctgacaaccaaaaatgtctccagatatgacaaatgtctcctgggagacaaaaatcacattcagttgataaccactgtttggaggcagcatgtaatttaattcagattttacagttactcggtcacatagggcgtttattcccaagacactggaggttcagagaggtttccttatttgtccagaaagtagcagaggtgggatttgaacccaagctgtccaatatcagtgtctcctctgttaactgctctgttgtgctgcttataaagtcatcatcccaatacaaggtcgggcgcagcggttcacgcctgtaatcccagcactttgggaggccaaggcaggcagagtcagaagttcaagaccaccctggacaacatggtgaaaccctgtcgctactaaaaatacaaaaattaacctagtgcggtagtgcacgcctgtaatcccagctgctcaagaggctgaggcaggagaatcgcttgagcccgggaggcggaagttgcaagagagtcgagatcgcaccactgcactgcagcctgggcgacagagcaagattctgtctcaacaaataaagggaacagaactagactcctaggaaagggaggacctaacacccagaggcaaggagcaggaggcagcaggaagaacctcagcagggctcctgccttgaaccccttctgcctgcctgggctggttccctccaaggagacacctggggaatcatctcccagcaatgggaaacctgcctgtttatgtgacagggttggtggccacactcacagcagccccatcaacgccatctgcctctaggacactgtggatatggagagagaaggtgagcgggtagatgagagggtcagggggaggatgaggaccgggctgtctctcctgcctgctcctgaggaagccagtgtttgttcattttttttttcccctcttttgagacagttttgctctgctgcccaggctgcagtgcagtggttcaatcatggctcactacagcctccaacttctaggctcaagcaatctgtccgcctcagcctccctagtagctggaagtataggtgcatgccaccatacccacctaatatatatatatatatgtgtgtgtgtatatatatatgtgtgtgtgtgtgtgtgtgtatatatatatatttttttatggagatgggatttcaccatggtacccagactaatttcaaattcctgggatcaagtgatcctcatccctcagcttcccaaagtgctgggattacaggtgtgagccactgtgcttggcctgttttttgttttttgtttttgagacagggtctttctctgtcaaccaggctgtaatgcaatggtgcaatcatagttcactgcactctccaacttctgggctcaaccaatcctcctgactcagcctcctgagtagctgggactacaggcactcaccgccatgccagcctgccaatatttgtgagtaaggcagaagacacagagtttacttacacagtcctcagattcaaatcacctttctctttttttggggtggtggggagacggagtctcactctgtcacccaagctggagtgcagtgatgcgatcttggctcactgcaacctccacctcctgggttcaaacgattctcctgcctcagcctcctgagtagctgggattacaggctggcaccactacatctggctagtttttgtatttttagtagagaacatggggtttcaccatgttggccaggctgttcttgaactcctgacctcaagtgatccacccgccttggcctaccaaagtgctgggattacaaggtgtgagccactgtgcccagcccaaatcatctcttgaagactcattttctttccttcctaaaatcaagccaattgcaatcttcccagagcaggaaacaaaatgcacagtgggaggaaaatgaaagaagtggactcagtgggactcaagtcccaattactcactgtgtgatctggggcaagtcacttaacctctctgagccttgtctcctcatatgcccaacggggataacagcagagggctgttgagatgatgcagtgatgtgatccaccatgcagggtgaaggaattaggacttaataaactcctgttactgtttttttttggggcggtggggcggttttttgttgtcattttgtttttttatttttgttttttgtttgtttgttttgagacggagtcttgcactgtcgccaagctggagtgcaatggcgtgatctcggctcactgcaacctctgcctcctgggttcaagcaattctcctgcctcagcctcccaagcagctgggactacaggtgtgcgccactacgcctggctaatttttgtattttgagtagagatggggtttcactgtgttagccagaatggtcttgatctcttgacctcgtgatccgcctgcctcagcctcccaaagtgctgggattacaggcgtgagccaccgcccagcctgttactggtttttattatttattattatttaattattattattattattatttattttattattacctacccacggagctgatgagtgacgccggggaggaagggtcgtgggtcaactgcctggtggctccaagtgttccttggtctgtggtttgggcaaagaccactgcgtcgaaaggcagccctgtggaggaagaaccaagttggttatcccagcaggaagtagaacgaaaaacataaaaaaaaaatttcttctggacttgctcttctttccataggaatctctgcatagtgactcgttcatttaccatttcatttatttaatatttattccagaccctcagtcactcattcatccaaccagcaaatatgtcttgagcaccttttatacgacagctgattctgaaaccaacccgatagtctcatagacagtatttatatacctatttaaatacttgaaactgacatttgttattgtttaactattttaggtttggggctacgtgtgaaggtttgttatataggtaatctcatgtcacggggtttgttgtacaaatgattttatcacccaggtatgaagcctagtacccaatagttattttttctgctcctctctctcctcctaacgcttaccatgaagtagaccccagtgttttttattcccttctttgtgttcatgagttatcatcatttagctcccacttctaagtgagaacatgcaatatttggttttctgttcctgggttagtttgctaaggataatggcctccagccccatccatgttcccgcaaaagcaatgatcttgttcttttttatggctgcatagtattccatggtgtatatgtatcacatttgctttatccaatctgtcattgatgggcgtttaggttgattccattgtctttgctattgggaatagtgctgcaatgaacattcacgtgtatatgtctttatggtagaatgatttatatttctctgggtatatacccaataatgagattgctgggtcaaatggtagttctacttttagctctttgaggaattgccacactgctttccacaatagttgaactaatttacactcccaccaacagtgtataaatgttcaattttctccacaaccttgccagcatctgttattttttgactttttaataatagccattctgactatggtgagatgctatctcattgtggttttgatttgcatttctttaatgatcagtgatagtgagcatttttttcatatgcttcttggctacatgtatctcttctttcaaaaagtgtctgttttttttgttttttggttttttttttttgatacagtgtctcactctgtcgaccaggctggagtgcagtagtgatcgcgcctcacagcaacctccgcctcccaggttcaagtgattctcctgcctcagcctcctgagtagctgggattacaggcgtgcaccaccgtgcccggctaatttttgtatttttagtagagacagggtttcaccatgttggtcaggctggtctcgaactcctgacatagtgatctgcccgccttggcctcccaaagtgctgggattgcagttgtgagccaccgtgcccggcctttgcccactttttaatggtgttgtttgtttttctcttgtaaatttacttaagttctctatagatgctggatattagacttttgtcaggtgcatagtttacaaatattttctcccattctgtgggaaacttacatttgttttatctgagttccttcctcattaaaggacccccagtcctctcaaaaagtatcaaagaaaagaaactcagcagatcatcatatccagacaatgagatgtcagacccctcattcctcatgattgcttcctgacccctcttgatttcctgttttactacacgtagtcacatttcttccctgctatataaacctgtaattttagttggtcagggagatggatttaagactgagctcccattttctcactgcagccaaggagattaaagtcttcttccttggtaataatcgttgtctcagtgattgactttctgtgtggtgagcagcaggacctagcctggacccctggtgttttggcaacaattccaagtttggggcacagagtgaggaacaagacaagtctttactccctcaaaaagtttatgtccagaacagaaaaccaaatactgcatgttctcactcataagtgggagttgaacaatgagaacacatggacacaggtaggggaacatcacacactggggcctgttgggggttggggggctataggggaggtataacattaggagaaatacctaatgtagatgatgggttgatgggtgcagcaaaccaccatggcacatgtatacgtatgtttgttaacctgcacgttctgcacatgtaccccagaacttaaagtataaaaaaaaaagtttacatcctagtggagaaagcagacaacgattcatccaacagataaataattaatgtccttgcagagagtgaagggaattttgaagtcactctaccaatgggagagaagcataattttccatagagtcatcagggaagacttctcataggaggtaatatttaaggagggccctgagagatgagaaggtacttatcacaggggaaatgtgcttgtgatggagggaactatatatgcaaaagcccagaggctggaataaacctgacccactcgagaaatttcaagaaggccagggtggccagagtgcattgagaaagcactggagtgctttctggctggagtgtaaggcgaaaccagctgggtaagcagaggtcagatctaatgaggagaaagaggaggaagggttgtaaaccagtgatgtatgaagtttagattttcttggaagtgcaatggaaagtcacggaggatttgaagcaacgggtgagggttgtgaccaggttagcattattaagagataattctgccagaaagcaaggaagtgctcaaagactaaggagatgatgttacaaggacaaagaagaggctataaagtcctcaagattggccaggcaccgtggctgatgcctgtaatcccagcattttgggaggctaaggtgggtggatcacgtgaggtcagaagttccagaccagcctggccaacgtgaaaccccatctccataaaaatacaaaaattagctgggtaatcccagctacttgggaggctgaggcagaagaatcacttgaacctgggaggcagaggttgcagtgagccgagatcatgccactgcactccagcctgggtgagagagccaggctccatctcaaaaatggatgaataaataagcaaataaagtcctcaagatcagaggctatgacttcaaactatactacaaggctatagtaaccaaaacagcatggtactggtacaaaaatagacatatagaccaatagaacacaatagagagcccagaaataatgccacatacctacaaccatctgatcttcaacaaaactgacaaaaacaagcaatggggaaaggactccctattcaataagtggtgctgagataactgggctacccatatgtagaagagagaaaaaaaaaaacaaaaaaggaaaaagaccatgggatgtaaaaatgtgaatgactgaaattttggggaaacttttattggatgtgtattttcatacctacagccctcaccaagaaaatacacacaaacacacacacacacggtcctactgaatggcactaaattatccacatactcctgatagattatttcactccctacaaacttctgagatggaagaagccagcttcctagggctccagggaggagaggaatttatgataagatagagcaatcccagtttcttagactaactagccaaacccctgtcaacctaaatagcaaacagagacagactctctaaaggaaaatatgttcatttgggaatagaacattgcagtgggaatatgcatgccactgtaatatacgtgcctattcaggaagacaaagctttttagaggaaaaattgaggagaattgcataatagttttgaaatatttgtccttggctacaaagatcgataacaaggataacaccttttctgtagagacagcgtcttggaaggctgggcacggtggctcatgccttaatcccagcactttgggaggctgaggcgggcagatcacaaggtcagagtttgagaccagcctggccaatatggtgaaacactgtctctactgaaaacacaaaaattagccaggcatggtggcgggagcctgtagtcccagctattcaggaggctgaggcaggagaaccacttgaacccgggaggtggaggttacagtgagctgagatcatgccactgtactccagcctgggtgacagagcaagactccatttcaaaaaaaaaaaaaagagagagagagcaggctgggtgcggtggctcaggcctgtaatcccagcactttgggaggctgaggcggatggatcacgagatcaggagttcaagaccagcctggccaacatggggaaaccccatctctactaaaaatacaaaaaattagccgggtgtggtggtgcgtgtctgtaatcccagctactcgggaggctgaggcaggagaatggcggtgaacccaggaggcggaggttgctgtgagcggagatcacgccattgcactccagttccagactgggcaacagagcaagactccatctcaaggaaaaaaaaaaagacagacagcgtcttgggttcaagggatcctcctgcctcagcctcccacactgctgggattacaggtgtgagccaccgtgcccggcctgcaggagtattttttgcgtaaggttgaggtggcctttgtgcaaggttgtggcttttggaatcttttgtgatagttgttatcaggcataccagcatgagaaccctcctttcatggccctccgtgactctatttgcccccttcattcatgcaacacatatttattgcacaactactatgtgccaggtactgcaacaggctgcatttggcaatgtctgaagacatttttggttggtgggagtgctgctgccatcccgttgtagggaacctgggatactgtttagcacttgaccaatatatgggacagcccaccctacctccccaaaggattatgagacccaaatccattgacatttgtgctgggattgagaaacctcgcttcagtgggattggtccaggttgtagcatacagggttgttgccatggagacaggcagataacgaacctgttcagtgggttgagagcagcatccaaaataaataaataaataagagaatataatagaattaaaaggcatcaggggctgggcacggtggctcacgcctgtaatcccaacagtttgggacgctgaggtgggtggattacctgaggtcaggagtttaagaccagcctggccaacatggtgaaaccccatttctactaaaaatacaaaaaattagccaggcatggtggtgggcaccggtaatcccagctactcgggaggctgaggcaggagaattgcttgaacccaggaggcagaggttacagtgagccgagatcgcgccattgcgctccagcctgggcaacaagagtgaaacatcttctcaaaaaaaaaaaaaaagaaaagaaaaaagaaaaaagtattttcatcatgcatctataagcaaaactggtcacaatggtaggatggtactggtacactggtacacaatacattgcacactggtacacaatgtgcaatgtatttcttaccatggatcccagtctaaaaagactattagactttttagctaatagctaataattaatgttagctcctgcatcagctcatcgtctgataggcagcacctgccttcctccctacctcatctctttgcctcgttctctcaatactgggagtcactgagaaagaggatgtctcagatcacaggggagctgggtcagaatcactagggtcttacagacccagtctgcccagggtcaaagcccagccctaccacatagcagctatgtgcccttggacaggttgcataactaactgcgccttggtttccttttctgcaaaatggaaatgataataggacgtacctcctattgtcctccaagttgttatgaggatttaatgaattcatatctgtaaagagcttaaaagagtgcctggtacatgttagtgttccctgttagctattatcattatcatgacttgctctagaatagcacttaccccagagtgtaattctttttattattaggggaagggggcaatgtgggttcagagtcactgagagggggtggatcagagccaggataaggatgagaagcccggctcagattcactgtgtgttggggacagggttggcagagctgcaagtgctaggacaagtgcaccaaaacaggtctgacaaagggttaaatgaagcagatgggattgttcagggtgggatgaaaggtccagggagggtggggacaatcaggcaggctgcctccctgcaccgcagtgtttgtttccttgacaggtgggaggcccagctccactcaggtatgtggccagaccagccagggcagccccctggacctctcatcccaggcagagatgaggagagggacagggtggggccctccagcccaggatggccccggcccacctcctctctcccacccaggaagggctgagccactttggacaatgggctgagtcccctggccccattcagccccactggcctggcctgtccccacagggactgctggaggtccttggggggatgttggcaccaactgctcctttgtcttgctacttaccctagaaagaacaagctaagggctctcctccccaactgaggaaagcaggatattttgccacgagcggcaaaggaggacccctgctgccccagaggaagaggagggaaaacatatttacccacacatgcacacacacaaacactcatgcacactctctcacacttatgcacacacaaaaactcatttgcatgcatgcacacacactcttacacacggacacacatgcacgaatacaaacactcatgcacacacttaaacttatgtacatactcacacagtctcacacatgtgcagactcagtcactcatgcacacgctaatacacacacaaatgcacatacatatgtatgcaaaatacatatgcacacacacacagctacacactcacatgtaagcattcaaacacacccacacatggacacacatgctgaaaaacaagcacaccctcattcatgcacacccacacacctatgcacacatgcatacacacatgcacacacatattcacactcgcacacatattcacacatgcttatgcacacacgctcagtcacacctgtgcacactcagacactcatcgcacacacttgtagacacataggtggatgcacacacaagtatgcacgcaagcactaagttgcacactcacacatggacacgtgcacacacttatgcacattcactctaacacacacatgctcatgcagacacacacaaggcacacacagacacataatcacacacttatccacacgcatactcactgggcaggaactcaagtcctagagttctgggtttcatcctggttctgccccaactcgcttcactgagccccagtttccctacagttaaagcagaaatagcagcatacacctccccaggcattgcaacaaggtcaacctgagatgagctagtcgtgaatctgtaacaagaaccccacccctcaagtcttagcttctcagtgagggcctttccttgaacccactttattggaaagagcaatgtgcccccacaacacactccagcacccccgagtctccatcctgtttcttttctccttattcccttcttttctggagtgcaatggctcaatcttggctcactgaaacctccatctcccatgttcaagcgattctcctgcctcagcctcccgagcagctgggattacaggcatgcgccaccacaccctgctgattttgtatttttagtagagatggggtttctccatgttggtcaggctggtctcaaactcccaacctcaggggattcacccgcctcagcctcccaaagtgctgggattacaggtgtgagccactgcacccggcccccttattcccttcttaacaatgcatcacgtacttactctggttttggtttaaggtcatccccctttgctgaaagtgtcagctcagcagggatcttttgatttgctcacagccatcccctcattgcctagaacagtgcctgcacacagtaggtgctcaataaatactcattgaacaaattgaatgaatgaatctcttcaaaagtattgactaaagaggtaaagggcccttcttgatagagtaaaactgcaaagaggacccttccttgatatcagtgtgcaaaatctcacatcaagggacctcccctccacaaaaaaagaataataaagagtccttcttttccaggttgagaaaggaggggatgtctcctctcctgggaagagtgacgacatctctagaagccaggcatgaaagaagagaatgaaaactccatccggtgtggattgaggcagagaccctactcacttcctgtggttcctcaaaaaattaaaaatagaactatgagccgggcacggtggcttacacctgtaatcccagcactttgggaggccgaggcgggcggatcacttgaggtcaggagattgagaccagcctggccaacatggtgaaactccccgtctctactaaaagtagaaaaattagccaggcatggtggcaggtgcctgtaatccccgctactcaggaggctgaggcaggagaatcacttgaacccgggaggtggaggttgcagtgagctgagatcactccactgcactgcagtctgggcaacagaggaagactccgtcacaaaaaacaaaaaaagaaacaaaaaaaaaaaacctgtgagctgagcatggtgattgatgcctgtagtcccagtgacttgacaggctgaggcaggaggatggcttgagcccaggaattggaggctgcagtgagctatgattgtgccactgcactccagcctgggtgacagagcaagatcttgtctctaaaataaataaataaataaaagtagaactaccatatgatccagcaatcccacttcttggaacatatactgtgaaaggaaaataaatctcgagaccccaaaatcacaaagccaaagggaaaagtcaggttgagaactacatcaggcaaaccagcctcccatttcattcccaaataagatagctaccaaattgtttgtttgtttgtttgtttgtttgttttagacggggtctccctctgtcgcccaggctggagtgcagtggctcagtctcggctcactgcaacctccacctcccaggttcaagtgattctcctgcctcagcctcctgagtagctgggattacaggcgcgcaccaccacgcctggctaattttttttgtttttagtagagatggggtttcagcatgctggtcaggctggtctcgaactcctgacctcgtgatctgcctgccttggcctcccaaagtgctgggattacaggcgtgagccaccgcacccggccaatagctaccaagatttaaaaagcaacatacctccctcaaaatttgcccacaaggaaattctttgtgggactcaagatatttaccctaaaacagttctgttgaatttcaccttggcaatgtaaatggacagcttatctttacagatgcgggacagaaagtcatccctccgctcgcctgagagaaatgcatatctgattgcttcctctgccctattgttcatgtaaaaatgcagatttatggacccagactaaggtttaagtgactattcctctacctccctctcacgtgtaaactgtgtattcagtgaaaggctaatcaaagactcaaaagtagccgggtgcagtggctcacgcctgtaatcccagcactttgggaggctgaggtgcgcggatcacaagatcaggagatcgagaccatcctggctaacacggtgaaaccccgtctctagtaaaaatacaaaaaattagccaggcgtggtggcgggtgcctgtagtcccagctactcaggaggctgaggcaggagaatggcatgagccctggaggcggagcttgcagtgagccgagatcgcaccactgcactccaacctgggcgacagagcgagacttaatctcaaaaaaaaaaaaaaaaaaaaaaaaaaagactgaaaagtatgcaaccatttgtctcttacctacctataacctggaaaccggccccctccccacccccccgcccacgccgctgccacttcaagttgccctgcctttccagaccaagccattgtatcttacacatcttgattgatgtctcatgtctccctaaagtgtataaaaacaagctgcaccctgaccaccttcggcaaatgtcatcaggacctcctaaggctgtcacaggcgtgttctcaaccttggcaaaataaactttctaaatggatggagacctatctcaaatactttgagttcacaatccaaacaaaatcaaatcagtatctccaagagacatctgcaccccccacgttcattgtagcattattcagagtagccaagatatggaaacaatttaagtgtccaccaatggatgaacagacaaaaaaattgtggtttatctacagtggaatattattcggtctttaaaaagaaagacattctgccatatatgacatcatggatgaattggaggacattatgcgaagtgaaataagccagtcacaaaaagacaattactgcatgatctcactcacgtgtggaatctaaaaaagtcaacctcgtggacaggtgcggtgcctcatgcctgtaatcccagcactctgggaggctgaggcaggcagatcacctgaggtcaggagttcgagaccagcctgaccaacacagtgaaaccctatctctactaaaaatacaaaattagccaggcatggtggtgcacgcctgtaaccccagctacttggaaggctgaggcagggaaatcgcttgaacccgggaggcggaggttgcagttagccaagatcatgccattgcactccagcctgggcaacaagagtgaaaatccatctcaaaaaaaaaaaaaaaggaaagaaagaaaaaatgctaaaagagttggtcttaaatgttctcacaatctcactattgcccctgcgccggcactaactgagactcaaactcctcgttgtcgtatttgtcggaatagtaaatttgtttgtgggacatgaccgctccatctgcgagccttcagccccaagctgccaacctccaagcaactcccagcagcaggcaggtataaagttttagttatgcaggatgaacaagttctggagacctaatgtacagcatggtgactataggtagtaacactgtattatatacttgaaatatggtaaaagaaggctgggagcagtggctcacgactgtaatcccagtactttgggaggccaaggcaagcagatcacctgaagtcaggagttcaagaccagcctgaccaacatggggaaaccccgtctctactaaaaatacaaaattagcctgtaatcccagctactcaggaggctgaggcaggataattgcttgaacccaggaggcagaggttgcagtgagccgagattgcaccactgcactccagcctgggcaacaagagttgctccatctcaaagaaaaaagaaagaaagaaagaaacatgctaaaaagagtttatcttaaatgttctcacaacataaaaaaaggtaatcatgtgaggtgatgatgggtatgttaattagcttgattgtggtaatcatttcacaagatgtacatatatcaaagcagtgtattgtacatgttgtatatgtatatggtgggattgctggatcatatggtagttctacttttatataaatacatgcaatatttatttttcgagtataactcaatacagtggggggtgggggggaagtagtctattaccttgttaattcattcattcattcatgtaacaaatatgtcttgtacacttactatgtgccaggtactggaacaggctgaagagaggaagtgtcaggaaggaaatccgtataggagagcatctgggatggaagagtgaccctcatgtcctggtctacccagggctttcttagttttactaaagtccctcatcgaaggaactgcctcaggctcaagcaaactgggatatcctactggtcatcctactgcgatctgtgtcctcctgacctggcatttgtccctgcggctctgggactgtgatcagtttaggtccctgggcacagctctgagctgcaggagtgaggagcttttgggagcacctccaaggtggagaagaagaggctggtacctggattagaagtcgggcctggataatggcaggaagatcaagagaatgggttcagttctaccctggctacctgggggtcttctctttgagctttttttttttttttttttttcctgagacaaggtctcactctgttgcccaggctggagtgcagtggtgcgatctcagctcacagcagcctctgcctccagggttcaagcgattctcgtgcctcagcctcccgagtagctgaggctacaggcgtgtgtcaccatgcctgactaatttttgtattttttggtagagacagggtttcaccctgtaggccaggctggtctcgaactcctgacctcaggtgatccacctacctcggcctcccaaagtgctgggattacaggcgtgagccaccgcacccagcccttcctctttgagcttctgttctctcatctataaaacggggatggtcatctggaccactgaatctacaatcagcatgagtgcatgcttggataatctgctatgtctggccttctggcccttgaggctccagagaggtaggaagagtctccttcacttgctcaatccaccctgggagaaccaagtgaccagacgaatccactgagcataaagaatgcccaggccggccgggcaccatggctcaggcctgtactcccagcattttgggaggctgaggcaggccgatcacttgaggccaggagttcaagaccagcctggccaacatgttgaaaccccatctttactaaaaacacaaaaattacctgggtgtggtggcacacgcctgtaatcccagctactagggaggctgaggcagcagaatcacttgaacccgggaggcggaggctgcagtgagccgagatcacgccactacacttcagcctgggcgacagagtaagacaccgtctcacaacacacacacacatacacacacacacacacacagagagagagagagagagagagagagagagagagagagagagagagagagagagtacacccagccaggcctgcccctcttggacccattgtcttcctttgctacccagcaactgggaagaaaggtaactctctctccaggattggaggaaacagtaagcaaacctttctgctttttggtgaaccaaaagtggtgaaagataaactgtaactctggcaagggcaggttagaccaggaacccacctcacagttccacccatgcccactacacacacccactcccaccaatgcccccttcccttcataatccaactcccttaacttcatatccccctggccaggcctgggctgggacaatgaccactgttcagggacccaggaaggggctcagcagcgcacaatgagatctgcctatgttctgtgtcttcacagcccttctcctgggacgggcagtacagaactcatttcctcggcggtgtggggggactcacgtacccagaaactgccaggagaggagaaatcctcaaccttcagtctcttcccaggcaaaggataaaaaccagcatttaggaatcatccagaaactggagttggaatcctggccgtgtgactttaaacaaaaggcttaagctctctgagcctgttttctcttctgcaaaatgggggataacggtgcccctgtgttcacccgtcaggcaggttcaacggagacaacacatgtaaagtgcaggaacatattacatagaaggtggatcctataaaatgatggtgggccgggcgcagtgcctcacgcctgtaatcccagtactttgagaggctgaggcgggtggatcacctgaggtcaggagttcaaaaccagcctgaccaacatggtgaaacccccatctctactaaaaatagaaaaaaaaaattagctgggcatggtggcaggcacctgtaatctctgcaactcaggaggctgagacaggagaattgcttgaactggggaggcagaggttgcagtgagccaagattgcgccactgtactccagactgggcgacagagtgggactctgtctcaaataaataaataaaataaaatgatggtcacagaggtcctttgggctcttggagtttctcagccacagggtggagggagaggcaactgggagatggatttctccagctctggaattcttctaaaaattgctctttggggagatggaaattcagagaggttagatgtctggctcaaggactcacagcttgccagcagtgggctcagatttacggccagggattaagagagtcttctccagtgttttatgtcaaaaatcccgcatggtgtctggactgactccaggggaatcccttgggaagggactgatgtggccagaggggtgatggggatggggaggggtgtcagcccaaagcccagtcctccctgaaacaggagcagggtctgcccaatgcaaacagcccccggcatcagaccctgagtgaaccttggggacaaatgcagtaaacagcctctgttggtggtgacctgctttgagtacaggtcagggggacacgccccactggaggtggtggggttgtcctatacaaacccgcccaccattcaggccattgtgtggaggcctcacaatggtgtccaaccacaaagctctccctccgtccccgactgcccggcctcggtgactcagggctgggggactggggtgccttcctcacctgcttctcaggctagatccggggcccgagtagggaagggcatgggggcaggtgaatcacagtctgtctgcatccagggcaccccccctccccggatggaggaggtggatgggcctcccccaaccccaaccccttgaggcccctcgtggcctccgtttccaggccaagctgtgagaaacagtccttcctcctcctctgagtaaatgaacagacatctgagcacccagctcattatagatctcctcttctgcaagcctcagttcatcttgcacacgagggctgtttggtgaaaaagccccaacttcctgccctcggaggcaaccggagtaaaataagttctgggtgggtttgggcagtcctgggttcaggtatgaacaatcttgaaacttccctgtagggaagagaggctggctcccttaagcccgcaacaacacacagaaacaccaagctggatgccagcccttccctgagcccagggtcttttctctgggcagtaatgtccaggctaatctcctaaaatgaccaacagttcttgaaagacccctttggacccaggaacatgcctcccacagccctcccacgctgcgtttctgcttccagtccttccctcggtatctccccatcacgcagcccagatacatgcagctcacaggaaaggacccagatacgcctgatggctccctgcctcctagtccatgcctactccgtccccgctgccgggaacgcccttctcttttgctcctaagtgtgcctgtaaaattccaaccctgtgcaattcagatgccaccctgcagtttaagacccctgcccccaccgccaccacccttaccccatcaatgcctcttagcaaagttcctgctcagccctgtaccccgactgactggacgccccagtctctctcgcccaccagatcggagctcctggaaccctgcggcggcgacttgctcatttctgtccctgagagctgggcacagatactgggactggaggtgccgctaaaaccccctcagggagtgagtgtgtgagtgagtcggtgatggaaggaatccttgggtgtttccacactcatctcggcagatactcaattcacaatacagcggttttgtgaactcgcccacgtcagtctggtaaatgcagattcattgggtcgggctggaggaggcatttacagaaaagcaaaagcaaaagcaaaagacctcctggctgtccctgctggggcttaggaagcacaaatcacctgtcataccagcctctctcctatatgaatccgtccagctcctcagtgagccccagcccagtcccacttacctggccagcaggtgaggaggaggctcacggccagcgctagcaggggcctgcgtcggtgccctgggtgtgcagggccctcccggcccatcctactgcctgcccaggctgtgctcctcaccccccgagagagtccctgagactgaacccagcccagtctggccccggctgcagggagggtggtgaggacacaccttgctgagcttctcaagaggggcagggcttgccctagagggaagcagtgggtgccttcctggcaaaggtcagctggcatgattcagtgcactcagtgactgacacctgcaggctgataccttccgagagcagcggcccgagggagcccccaccgcggacagagcctgactccagagtctgttgccaaactgggggtccctctgggcttgaaggaaaacagggacccaggcatagacctgtcccgttctccaaagtccccaggttctacctgaccccctcctgcgcagggactggcaccgccagactggagctgggtggaccctccttgggggaggcacagctgcctctggagggttttggaatgttcaggagtgtacgcgaggctgcattcccacataggaactccctggctgccaggggagctgagggccggccttctcgtacccttccaaagccccacagagccacacccgctatactcctgccgcgctctgagtcctacaaaaccacctcggggctgcagtccctcactccccggtcaagctcttcagctgcccttgacagcagcagagaggcaaggaaggggctggtgtggggtacagggaggggattgggggttcttcctcctcctcaccagccctgcaatctccaccagcttcttctcaccccaggcctgggtgatgacaatagtcatttcagaagtaggctcttccccctcaaatcggcccagcacagattgcagggtgatgttttttaagtaccatgcccctcaagacacccccctgctgtccccctttgtccaggcactcaagagaccccccacccctctagcctctaacagtcagaggaagtgggtttatcatcacccatatcacccatctttttttttttttttttttgagatagagtctcgctctgtcacccaggctggagtgcaatgacgtgatctcggctcactgcaaccgccacctcccgggttcaagagattctcctgcctcagtctcccgagtagctgggattataggtgtgcgccaccacgcccagctaatttttgtgtttttagtagagatgggtttttgccatgttggccagtctggtttcgaactcctaaccttaagatccacccacctcggcctcccaaagctctgggattacaggcatgagccaccgtgcccggcctgtcatcacccatcttcaagataaggagacacctgcaggtgcccagtgtgaaggaggcaggcagtggatttggacctcagcgtgccagacacccccacagggccaaccacttctcctgggtcttgtacctggagccaaactccatggccctgtggctgggctcatggcccagggaagtctgtcagcaacccctgggggcttatgctctgttcaatttcctattaaccgtttctcttctctccttgctctgtagcccttcctctcagcatagacataccttgagccccaggaaacaccctgggcaggcaatctggccaaaacagataaatgaacaagtacaggtgatcaagctggaaatgagaggtaggtgggagatgccaaacccagactgggagggggcagggaatcagggaagtcttcctggaggaggtggcacgtgcatcaagatggaaagataggctggagtcctccagaccaggggagatggagagaagggaagggaagggagtttcccaaggaggagacagtggctggaagcaacagaaaggaaagctggaaggggaaagttgagcctaagttttgtccaaactcccaccctagttctctctcaaggtacccgtccctcacttaagaaaaatcatcgcagagaaacagaaggcaagccagtgagttttctgggcaatcactgtattcaatttcgcctacctcagagatgggaaaactgggcccctaaaaagagtatcacctgtaatcccagcactttgtgaggcagaggcgggtggattacctgaggtcaggagttcgagaccagcctggtcaacatgatgaaaccccgtctccactaaaaatacaaaattagctgggcatggtggtgcacgcctgcgatcccagctacttgggaggctgaggcaggagaattgcttgaacccaggaggtggaggttgcagtgagcggagatcgtgccattgcactccagcctgggagacaatagcaaaactccatttcaaaaaaaaaaaaaaaaaacacagagcaccagaatctgcaagatcagcgacagaactggaaacaggccccaggactctggagtccacaaccagtgctcttcccgagtaagcagtgcaaatcctctttctctagcacacagcagcaagtatccctaagcaccatagtacatcatgccttaggtccaggggtcgcccattcttataaggagtgcatctgggaaaatgggtttagattccagataggtcattagagctcctggtttttgttttgttttgttttgtttgttttggtttttgtttcattttgttttgttttttggggatggagtctcgctctgtcacccaggctaaagtgcaatggcatgatctcggctcactgcaacctccacctcccgggttcaagcgattctcctgcctcagcctcccaagtagctaggattacaggcatgcatcaccatgcctggctaattttgtatttttttttttagtagagacaggctttcaccatgttggccaggctggtcttgaactcctgacctcaagtgatccacccacctcggcctcccaaagtgctgggattaccagcatgagccactgtgcctggccctgttatcctaaatgaataacccagggacagaaaatcacgttctcacttataagtgtgaggtaaacaacggatatgtatggatgtgaagatgggaacaagagacactggagggtactacaggtgggaggcaggaggcggggctagggctgaaaacccacctattgagtactatgcatagtatctgggagacaggtgcattcgtaccccaaacctcagcgtcatagaatatacccatgtaacaaacctgaacataatttgtacctcctgaatctaaaataaaagtggaaattataaataaataaataaataaatgtttttaaagtatgttttaaaaaattaggccgggtgcaatggctcacgcctataatcacagcactttgggaggccaaggcaagtggattgcttgaggccaggagctcgagaccagcctggccatcagggtgaaacctcatctctactaaaaatgcaaaaaaattagccaggcatggtggtgcacgcctgtaatcccagctactcaggaggctgaggcagaagaatcacttgaacctaggagggggaggttgcagtgagcgagatccagcctgggcaacagagtaagactctctctcaaaaaaaataaaataaaatagcctctgactgttggtggtaatgtaaattagttcagcccctatggaaaacagtatgaagatttcccaaagaatgaaacatagaactaccattcaacccagcaatcccactactgctcaaagggaaaaaaatctgcccaaaggaaaagaaattgtcttatctaaaatacacttgcacctgtatgtttattgcagtactatacacaaaagcaaagttgtggaataagtgtccatcagtggatgaatgaataaagtaaatgtggtaagtatacgccatggaatactatacacccataaaaaagaatgaaatcatgtcctttgcagcaacatggtggagatggaggtcattatcctaagtgaaataactcagaaacaggatgtaaaataccatgtgttctcacttaaaagtgggagctaaacaatgagtatacatggacacaaagatggaaataataggcactgggaactccaaaaaaagggagggtaggaggaagagtgagggttgaaaaattacctattggccgggtgcggtggctcatgcctgtaatcccagtactttgggaggccaaggcaggtggatcacctgaagtcaggagttcgataccagcctggccaacatggtgaaaccccatctctactaaaactactaaaattagccaggcatggtggcgcattcctgtagtcgcagaactcgggagactgacgcaggagaatcgcttgaacccgggagacggaggttgcagtgagccgagatcacaccattgcactccagcctgggcaacaagagcaaaactctgtctcaaaaaaatttttttaaaaattaaaaaaaaacttggatgatgaaataatttgtacaacacacccccgtgacatgagttcacctttgtaacaaaccttcccatgtacccttgaacctaaaagttttttaaaaaaggaactgggggagaagtgtacagatttctgggtgctctcttctcaaaggtctgcctgccccttgtgggaaaatggagaggaccacagcagaatcaaagacgaagcaaggcaacctctgtctcctgctatccccagactgacccggcctgagccagctttgcttatgtgataacatcgctaggggcaaagaagagacgtcagggctgggtggtgctggccgagtgagacagagggctgagggacgctgctgagtagagaaaagggagagagataagtggcggagacagaggaggcagggtcagagagcaggaggagaaacccacagttatcactaaacagcaaggtgcagtggggtttgtttgtctgagcttttttttttttctttttttgagacggagccttgctctgtcacccaggctggagtgcagtggtgtcatctcggctcactgcaacctctgcctcctgggttcaagcgattctcctgcctcagcctcccgagtagctggggttacaggcacctgccaccatgtccggctcacttttgtatttttggtagagacggggtttccccatgttggccaggctggtctcgaactcccgtcctcaagtgatccacctgcctcagcctcccaaagtgttgggattacaggcgtgagccaccgcacccggccagggagtggatttcaatggcacgggagagtctcccagggcaaacatcatggaaaaggtggaactagaggaaactcagaaaagctgttggcatttcttaataagatgggggtttccacgtaggagaacagaccagcctggattgtcaggcttagaagtcacaggggacactgggcatggtggcttatgcctgtaatcccagcaccttgggaagccgagcctagaggattgcttgagcccaagagtttgagaccagcctgggcaacataatgagactccatatctacaaaaaataaaatacaaaaattagccaggcatggtggtgctcacctgtagtctcagctactcaggagcctgaggtggcaggatggcctgagcctgggaggtggagactgcagtgagccaagatcacacctctgcactccatccagcctgggtgacagagtgagaccttgtctcaaaaaaaaaaaaaaaaaaaaaaaaagccaggcatggtggctcatgcctgtaatcccagcactttgggaggccgagatgggaggattgcttgaggcaaggagttcgagaccagtctgggcaatatagtgagaccccatctctctaaaaaaaaaaaaaaaaaaatcacaagggaatgacaggggagctggaggtagtctaggttcaaatccccacagtagaagaaatgaacatgaccctaaaagtgtttaccgagaacttagtgtttcccaggcatccatccgcgaaaccagaagaaaggacactgacattaaatcacagcatccacaaatgacgtgagttcaatattttctctgagccacgcccttcccagaagtgaatggctcttcattctcgaggtttctctgtgaagtggtgcgtttcattgacccattttacagtggtggaaactgaggcacaaagaaattacataactcacacaagattgcacagctgggccctgtatgtttccatttgcaatgtgttcaaggacaggcaagaggaattgaggggaaagaagccaaaagagtgttctgaggtggagcgtgatgtctcatgcctgtaatcccagcactttggaaggctaaggcgggcagatcacgaggtcaggagttcgacaccagcctggccaacatagtgaaaccccatccctactaaaaatacaaaaaaaaaaaaaattagctgggcatgatggcgtgcacctgtaatcccagctactcaggaggctgaggcaggagaattgctcgaacccgggaggcggaggctgcagtgagccaagattgcaccattgcactccagcctgggaaacagtgcaagactccacctcaaaaaaaaaaaaaaaaaaaaaaaagggtgttctgaggatgggggcactgtctgtctggaaaaggggtttgaaggagctttctacagcagtggttttcttttcttttttttttttgcgacggagtctcactctgtcgctcaggctggaggcagtggcgtgatcgcagctcactgcaagctctgcctcccgggttcaagtgattctcctgcctcagcctccccagtagctgggactactggcgcctgccaccacacctggctaattttttgtatttttagtagagacagggtttcaccgtgttagccaggatggtcttgatgtcctgacctcgtgatctgcccgcctcggcctcccaaagtcctgggattacaggcgtaagccaccgcacccggccagcagtggttttcaagtgagggcaattgtgcctcccagctgccatttggcaacgtctaaagatgttgttttaactgagagagaaggggtgctactggtgtctaataggtggaggccagagatgctgctaaacatcctacaacacacaggacagccccttacaacaaagtattacccagcttctaatgtcaaaagcgccaaggctgagaaatcctgttctagaaaaaatgggccgcaggtggcttatgtctgtaatcccaggactttgggaggctgaggcaagaggatcacttgagctcaggagttcgagaccagcctgggcaacatagtgagatggccccactaaaaataataaaaaaaaaaattagccaggagtggtggtgcacatctgtcgtgccagctaccctggaggctgagacatgaggactgcttgagcccaggaggttgaggctgaagtaagccatgactgcctcgctgtactccagcctgggtgctagtatgagactccgtttcaaaaaataaaattaaaattaaaaaaaataatagaggaagggaacattttacatcgtggtgtgcaatggttacacatatgtaaaaattcattgacacgcacttaagattcaggcattttgtgcacactttacttgtgtctgttacattgcaacaaaaagttgttttttttttttttttgagacgaagtcttgctctgtcacccaggctggagtgcagtgggccaatctcggctcactgcaacctctgcctcccaggtttaagtgattctcctgtctcaacctcctgagtagctgggattacaagcgtgcgccactatgcctggctagtgtgtgtgtgtgtgtgtgtgtgtgtgtgtgtgtgtgtgtgtttagtagagatggggtttcaccacgttggccaggctggtcttgaactcctgaccttaagtgatccacccgactcagcctcccagagtgctgggattacaggcgtgagccacagtgctcgaccccttctaagtaatgactcggcccactgcctcacctctgttcatgccctcatcctctctctctgcctgccttcccgaaatagcttctttactcatattcatcttctaccaccagctccaccctcctccagttcccctccgcccgcccagccaacagagtgacctttcaaaaatgcaacaccggccatgccccgccccggtccgaattcttcagtgccttctcaccgccctcgggaccaagtccaaacgctgcagcctggcgttgaaggcccaccttgagccgggacccggcctgcattggactaacgtatgacttcgcttctcaccccgaagcctttgcctcggccgttccctgtgccggaattaccctccttccctttacctgattctgtgtcccctaattctctccaggcctcccctacctccctccccagacagaaagcagagctccccgccctgttcccaaagcaccttgtaacttccttgtaaaatcgtttgaccacaggatcgcgtatctgtgttttcatctcttataactctctctagtgtgtgaatatgaagagggtacctgactatgataggtgtgtcacacagacaaaaaaaaaaaagtttgttgaatgatttattcatatattgaccattcaccagggaccaagcgctggggataaagagaaggaacaaggccgggcgcagtggctcacgcctgtaatcccaacactttggacggccaaggggagcagatcacctgaggtcagcagatcgagaccagcctggccagcatggtgaaaccccgtctctactaaagacacaaaaaattagccgggcgtggtggcgcatgcctgtaatcccagctacttgggaggctgaggcaggagaatcacttgaacctggaaggcagaggttgcagtgagccgagatcggcccactgcactccagactgggtgacagagcaaggatctcaaaaaaaaaaaaaagagaagagaagaacaaggccgggtgtggcggctcatgcttgtaatcccaaccctttgggaggttgagactggaggattgcttgagcctgggaggagttcaagaccagcgtgggcaacatagtgagaccccgtttctacaaaaaaaaattttttttttaattaggtgggccgggcatagcagcatggagcccggccgccgcagcacctctgctccgcgatccgtgggcatcctcttcactgtgtccattggatgtttgcctcccagactgagggggagctcagaatgacccaaattctcaaaacaagtttcctcaccgggcgcggtggctcacgcctgtaattccagcactttgggaggcgaagtcgggtgaatcacgaggtcaggagttcaagaccagcctggccaacatggtgaaaccccgtctttactaaaaatacaaaaattagccaggcatggtggcgggcacctgtaatcccagctactcgggagggtgagacagaatcgcttgagcttgggaggcagaggttgcagtgagccgagatggtgccactgcactccagcctgggtgacagagtgagacaacgtcaaaaaaaaaaaaaaaaaggaaaaaaagaaaaaagaaaagtttcctcgagctacagctatcaaagtcactgacatttcaagaggttgtggggtcatgtatgaaattaaaattgaatcagaagaagttaaggaggagagaactattcagcagcaccaaatagtgaatcagtcactacaagaagaaatcaaagtgatgcatggattgcggatatttacctctgtccccaaacgctcagcacaccctggctgcatagatgctgctgcttaagaccttggatgaacttgactgacaccattcttccctaggcatttaccaaaaaatttgtatattttgctcgtatacatttccatattataattatagaagatgtgtaatctatttagatgttaattaaaggaaacaacgaaaaaaaaattagccaggttttgtggtgtgtgcctgtagtcccagctactcggaaggctgaggtgggaggattgcttgagtccaggaaatgaaggttgcagtgatccgagatcgcaccactgcacgccagcctgggcaacagagcaagaccttgtctcaaaggaaaaaaagagaaaaggagagagagagagaggagaacaagattcaggaggctgatgctagaggatctctttgaggccaggagttcaagaccagactgggtagcatcgtgagaccccatctctaaacaaataaaaaacttagccaggtgtggtggcaccagcctgaagtcctagctatttgggaggctgagacaggagaattatttgagcccaggagttcaagaccagcctgggcaacatagtgagatcctgtctctacaaaataaaaaaataaaaaatttagacaggcacagtgttacctgtagtcccagctacttgagaggctgagaaaggaggatcgcttgtgcccaggagttggaagctgcagtgagctatgatcacaccactgcactccagcctgggtgacagggcgagaccccatctcttaaaacaaaacaaacaaaaaaagagagatgaacaaagcagatgccttgtattttctgtacccctttgttttgttttcatttttgttttgagatggagtctcgctccgtcacccaggctggagtgcagtggtgcgattgcagctcactgcaacctccagctcctgggttcaagctattctcctgcctcagcctcactccacttcccaggtatgacaaccagaatgtctccagatattgccaactgtcccctgggggcaaaatctctcctaattgagaaccactgattgatgtcaataccaaagagtctttttttttttttttttttgagacagggtctcactctgccctccaagctacagtgcagtggcatgatctcggctcactgcaacctccgcctcccgggttcaagcaattctcctgcctcagcctcctgagtagctgggattacaggcacccgccaccatgcccaggtaattttttgtgtgtttagtagagacagggtttcaccatgttggccaggctggtctcaaactcctgacctcaggtggtctgccctcttcggcctcccaaagtgctgggattacaagcatgagccgctgtgcccggccaaaagagtctagactaaagaaaagtccggttatcaagaagagacatgacttcaagtatagtccggtggctaaaagctatggctctcagaacagtttattgagcacttaagatgtgtggattttcgtgagtataaattatacctccatataaagggaaaaatagaggaggatagtattctatatctttctgtggtgatgctgatgttctatatcttagtagggatttgggttagacagatgtttgcatttgtccaaacttagccaacgtacacttgaggtctgtgcatttaattgagtataaacttgacctcaaaagataaaattctatacgtgaatactgacctctagttaatgctctgcgtgaagaactttttgtttacttttatatttatttatttatttacttttagagacaaggtcttgctatgttgcccagtctgtggcgtgcagtggcacaatcatagttcactgcacccttgacctcctgggctcaagcaatcctcccatctcagcctcctaagtagctgggactacaagcatgcactaccacgcccagctaattttttacttttttgtagaaataaggtctcgctccattgcccagcctaatctggaactactctcctcctgcttcaccgccgccgcctcttcctcctcctccttctccttcttctccttcttcttctccttctcctcttccttcttttctttcttctttctttctctttctttcttctttctttctttctgtctctctctttctttttctttctttctttctctctttctctttctgaaacctcttcctcttcttccttcttccttccttcctcgtcctcctccttcttctttcttcttttgtgagacagggtctcactctgtcacccgggctctgagtgcagtgacacaatcatagttcactgcatccttgacctcctgggctcaagtgatcctcccaccttgacccccacccaaagtgctgggattacaggcatgagccactgcacctggcctgcaaaattatttctatgtttgaattttttatgataagattttgggggaaatcccttgcatttttgcatgttactgcatacaaattctaatttcaccttcaaaagggggaaaataagagtatacatggctttgaagtcagattcacctgagttcaaatccccaaagggcttcacttctcacatggctatgcccttccttcttctgacctgctttctgtcccatcaacctgggctaatgatttattgaggtggggttttaagcacaagctagggaaccagacacactgggtttaaatcaaagaccattattctaagtgaattaatgcaaaacagaagaccaaataccacgtgttttcacctctaaggagctaaacactgagtacacacagacataaagatgggaatgataggccgggcgcagtggctcacacctgtaatcccagcactttgggaggccaaggccagtggatcacaaagtcaggagtttgagaccagcctggccaacatggtgaaacaccgtctctactaaaaatacaaaacttagctggttgtggtggcgggtgcctgtaatcccagctactcaggaggctgaggcaggagaattgcttgaactcgggaggtggagcttgcagtgagccgagatcgcacactgcactccagcctgggcgacagaggagactccgtctcaaaaaaaaaaaagaaaagaaagaaaaaaaaatgacaactccaccagttcccaggtgtgccgtcttgggcagtgacttcagtgttttgtgcatttgaaatgggtaatgacagcacctactttgcagcattgctgtgaggctgaaatgaggactcccggtgcccttccagcaaagctggtgaagtggcatcaagcatgtttatctgtgagagggtgcgagacacctgcagtcaccctgggggagactttgagagacttcagaaaagcaggagtggggcagggccaaggaaatattttcttgcaattatttgcaattactaaatctgtttgcttttatcctccccaggcaatggaacctgaaaaacagaggtttcaaaggcacatctgggctggcacggtggctcatgcctgtaatcccagcactttggagagccgaggtgggaggatcagtagaacccagaagtttgagaccagcctgggcaacatagcaagacccccatctctacagaaagttaaaaaattagccgggcggccgggtgcggtggctcacacctgtaatttcagcactttgggaggccaaggtggatggatcacaaggtcaggagttcgagaccagcctggccaacatggcaaaaccctgtctctactaaaaatacaaaaattagctgagtgtggtggtatgcacctgtaaacccagcttctcgggaggctgaggcaggagaatcacttgaacccaggaggtggaagttgcagtgagccaagatcatgccactgcattccagcctgggcgacagagtgagactctgtctcaaagaaaaaaaaaaaattagccaagcatgttggtgcacacctgtactatcagctactcatgaggctgaggtgggaagattgtttgagcctaagagttcaaggctgcagtgagccattaccatgcctcacttcagcccgggtgacggggcaagatcttgtccaaaaataatttttctttttaaaaagcacacctgctctttcctgattgtaaatcttaaaagcaggattaagatgcccgccaggacttgctgtggggtctccagccctcagctcaatcccctattatacttattaagtccatctctccatatttactgaattatgtaaagggtagaggcaaagataattatggtctcaagtatgggtgactctgaagccagaagccccatggtttgaattgtgtccccctgaaaaatagacgttgatgtcctaatgcccagtacctctcagaatgtgaccttatttagaaatattggaaacgaggctaccagggtgggctctaatccaataggactggtgtccccttaaaaaggggaaatttgaggccgggtgtggtggctcccgcctgtaatcccagcactttaggaggccgaggtgggtggatcacgaggtcaggagttagagaccagcctggccaacatggtgaaaccccatatctactaaaaatacaaaaattagccaggcgtggtggtacgtgcctatagtcccagctacttggggagggggctgaggcaggagaatcgcttgaacccgggaggcggaggttgcagtgagccaagaccatgccattgcactccagcctgggtgacagagtgagactccatctcaaaaaaaaaaaaaggttggggaggaaatttgggcaccaagacagacatacacagagataagcccatatgaagatgacggcaaagattggagtgaggtatccacaagccaaggaaacttgaagattgtcagcaaataaggccgggcgtggtggatcacacctgtaatctcagcattttgggaggccgaggtgggaggatggctcgaggccaggaggccagcctggctgacatggcaataccccatctctactaaaaatacaaaaattagctgggcatcgtggtgggcacctgcaattccacctactgaggaggctgaggcaggagaatcattgaacctgggaggcagaggttgcagtgagccaagatcgctccactgcactccagctgggcaacagagtgagattctgtctcaaaaaaaaaataaagttagcaaacaaccagacgctgggagagagacataggacagatccttccctccacagccccagaaggaaccaaccctgtccacaccttgatcccggacttctggcttccagaacagtgagacactaaatttctgttgttgaagtcacctagtctgtggtactttgtcactgcagccctaggaaattaaaacacgctgtaaatagcagtaaaggagctggtagtggggcgggagaagagggggcaatgactcagttcacactgtcagatttttgccaggggctgacaggtaccagggaaagtgtcaggtatgaggacgtgacagtgactgagggttacagcccctgcccccagggggctcagagtgacattgccgaggtgggtgatgaataagaaataggtccatgccccttaggtgacaacagtgggttggacccacaaggagggagttgactctaatctggggctccatgcaacctgaggttggatgcctaaaagatgggtagtgttggccaggtggagtggctcatgcctgtaatctcagcactttgggaggccaaggagaggacatcacttgagctcaggagtttgagaccagcctggccaacacggtgaaactccgtctctactaaaaatacaaaaattagccaggcgtggtggcgcgtgcctgtaatcccagctactcagaaggctgaggcaggagaatcacttgagcccaggaggtgaagcttgcagtgagctgaggtctcgccactgcactcctgcctgggcaacagagcaagactctgtctcacaaaattaaaaaaataggccgggcctggtggctcacgcctgtaatcccaacactttgggaggctgaggcgggcagatcacttgaggtcaggagtttgagaccagcctgaccaacatggagaaagcctgtctctactaaaaatacaaaattagccaggcatggtggtgcatgcctgtaatcccagctactctggagtctgaggcaggaaaatcgcttgagccccgggaggcggaggttgcagtgagctgagatcatgccattgcactccagcctgggcaacaagagcgaaactccgtctcaaaaaaaataaatacataaaaataagaaataaagaaataaattacccagtctcaggtatttctttacagcaatgcgagaatggcctaatatgccttgcctccagtgtgggctgaacctaatgactccgttctaaggaacagaaaccggcaaaagcaatggtgtgtcacttttgtgattaggttacaaaagactgcgatttccatctcactgcactccatctagctccttcttggcttgcatgctttgaaaaaacaagtggcctcctgggagaaagccgcgtggcaatgacactgagggttttgtttggttttgttttgttttgttttgttttgtttgagacagagtctcgctctgtcgcccaggctggagtgcagtggtgcgatctccgctcactgcaacctccacctcccaggttcaagtgattcttctgccccagctcccgaacagctgagaccacaggcacgtgccaccacatccggctaattttttctttttgtttgtatgtttgtttgtttttgagacggagttttgctcttgttgcccagactggagtgcaatggcttgatctcagctcactgcaacctccccgtcctgggttcaagccattctcctgcctcagcctcccgagtagctgggattacaggcatgcaccaccacgctcagtaattttgtatttctagtagaggtggggtttctccatgttggtcaggctggtctcaaactcccaacctcaggtgatccacccgcctcgcctcccaaagtgctgggattacaggcctgagccatcacacccggctgacactgagggccttaatctaatagccactgggactaaatcctgccaacagggagcttagatgtcagtcctcccctagctgatccttacagtgaggacagccttggatgacatctggataccagcctaggagagaccttgaggcagaaaacccagcccagagtccaggcccactggaactgtagataataaatgttgttttgagcccattcattttggagtaatttgttacacgatgatagctgatacaaatgccacacaccaactgactcatgtccacttcattgacttccctgtttttgtggaggatggaggccttcacttttccaaataaattttttttatttttacttattattattattattttgagatggagtctcgcactgtcacccgggctagaacgcacgggcgcaatctcggctcactgcaacctccgcctcctaggttcaagtgattctcttgcctcagcctcctgagtagctgggattacaggtgtgtgccaacacacctggctaatttttgtatttttagtagagatggggtttcaccacgttggccaggctggtctcgaactccttacctcatgatccacccacctcagcctctcaaagtgctgcgattacaggcgtgagtcaccgcgcccggccttcttttttttttcaattgttttttcttttatagaggtgaggtcttgctgtgttggccaggctggtcttgaactcttggcctcaagcaatcctcccacctcggcctcccaaagtgtaggattacaggcgtgcaccactgcgcccgaactccaaatgaatttttgttgcttatgtgaagtcacttcaaagaggctcttattgacctctgcagaatcaaagaagttggacttttctgtttggatttcataatagtaagtgaacctgccactgggcattccttttgtttttgttttttgagacagggtctccctctgtcacccaggctggagtgcagtggtgttatcatagctctatgcaacctcgacctcccaggcttaagccatcctcccacctcagcctcatgagtagctgggactacaggtgcaccccaccatgcctggctaatttttgtattttttgaagagatggagttttgccatgttggctaggctggtctccaactcctgggctgaagcaaatcctcctgcctcgccctcctgaagtgctgggattatgggtgtgagccaccacactccacctggacttcttaactaatatctagaagagagctgttacttcggaaaaaaccctcaagcttttttttttttttttttttttgaggcagagtctcgctctgtcacctaggctgaagtgcagtggtgcgatcttggctcactgcaacctccgcctcccaggttcaagcgattctcctgcctcagcctcctgaatagctgggactacaggcgcacaccaccacacccggctaatttttgtatttttagtagagacggagtttcaccatgttggccaggctggtctcgaacgcctgacctcaggtgatctgcctgcctaggcctcccaaagtgctgggattacaggcatgagccagtgcgcctggcaaaaatccacaaactatttcaaggagaggggaaaccaagatgttctgagtgggtagaggaagaaggtgaggatggagctgagctggaccctggatgagggcatttcaggaaaatctgagccccaaaaaatgaccccggtggacacactctccccagtgctgcagacactgcaataaccaaatatctagctagtcatgtgaaatcttcagagttaacaaaaattccctaagatgttgacaatttaattaaaacatttctaatctacttaaaaaaaaaggttaactgacacatattgtatatatttacagagtacaatgtgatattttgatccgtgaacacattgtagacagattaaatcaagctaatttttgtttttgtttttgtttgagaaggagctccgctctgtcacccaggctggagtgcagtgccacgatctcggctcactgcaacctccacctcccgggttcaagagattctcctcctttagcctcctgagtagctgggattacaggcatgcgctaccatgcctggctaatttttttgtacttttggtagagacgggattttgccatgttggcctgtctggtctcaaactcctgaccccagatgatccgcccaccttggcctcccaaagtgctgagattacaggcgtaagccatcgtgcccagccataaatcaagctaattaacatatctatcacatcacctacttagcactttttggggagacgagaatgtttaaaataggctctattaggctggacgaggtggctcatgcctgtaatcctagcgctttgtggggctgaggtgggtggatagcttgagcccaggagtttgagacaagctagggaaacacagtaaaaccccaactctacaaaaaatacaaaaattagcccagcatggtagctcacacctgtaatcccagcactttgggaggccaaggcgggtggatcacctgaggtcgggagttcaagaacagcctgaccaacatggagaaaccctgtctctactaaaaatacaaaattagccaggtgtggtggtgcatacctgttaattccagctactcaggaggctgaggcaggagaatcgcttgaacccaggaggcaaaggttgcggtgaccgagattgcgccattgcactccagcctgggcaataagaatgaaactcaaactcaaaaaaaaaaaaaatacaaaaattagccaggtctggtggcatgcacctgtagtcccagctactcaggaggctgaggcaggaggatcacctgaaccagggagggagaggtagcagtgagctatgatcacaccactgcacaccagcttgggggacagagtgagaccctgtctcaaaaaaaaaaaggctttgttagcaatatttaaatatacatgattgctaactatggccatcatcccatgcagtagatcattaaagtgtgttcctattgactattatttaaaagatacgccgggcacagtggctcacgcctgtaatcccagcactttgggaggctgaggcgggcggatcacgaggtcaggagatcaagaccatcctggctaacacggtgaaaccccacctctactaaaaatacaaaaaattagctgggcgtggtggcaggcgcctgtagtcccagctactccggaagctgaggcaggagaatggcgtgaacccgggaggcggaccttgcagtgagccgagatcgcaccactgcactccagccggggtgacagagagactccgtctcaaaaaaaaaaaaaagacaaaaaaatatttaataacagatgttgatgaaaatgctgagaaaagggaacgcttgtacactgctggtcagagtgtaaattagttcgacctctatggaaaacagtatgaacatttctcaaataggccgggcgcggtggctcacgcctgtaatcccagcactttgggaagccgaggcgggcagatcatgaggtcaggagattgagaccatcctggctaatacagtgaaaccctgtctctactaagaatacaaaaaattagccaggcatggtggtgggcacctgtagtcccagctactcgggaggctgaggcaggagaatggcgtgaacctgggaggcggagcttgcagtgagccgagatcgcgccactgcactcaagcctgggcgacagagtaagattctgtctcaaaaaaaaaaaaaaattctcaaataactaaacaatagaactatcatttgatccagcaatcctactactgggcatatactcaaaaaaaaaaaaaaaaaagaaatcaatatatcaaaaagactcctggctgggcatggtggctaagcatgtaatcccagcactttgagaggccaaggtggacagatcatttgaggtcaggagtttgagactagcctggccaacatggtgaaatcccatctctaatataaaatacaaaaattagccaggcgtggtggcaggtgcctgtaatcccagctactcagaagacagaggcacaagaattgcttgaacccgggagatggaggttgcagtgagctgagatcacgccatgcactccagcctgggtaatagagcaagactctgtctcaaaacagacaaacaaacaaacaaacaaacagatacctgcacttgtaggtttatcacagcactactcgcaatagcaaagataagaaatcagcctaaatgtccatccacagaggactggctaaagaaaatgtggtacatatacacagcgcaataccacacagccataaaaaaaaatctttgagccgtgaaatcatgtcttttgctgcaacagggatggaactggaggtcattatcttaagtgaaacaggtcagacacacagtcaaatattgcatgttcttactcatacatgggtgctaaaaaatgtgttcatgtggatgtagagagtggaatgacagagcagatgtggtagggtgatgagaaattacttaatggctatgatgtaccttattggggtgatggataccccaaaagccctgacttcaccactatacaatttatgcatgtaacaaaattacataccctctctagatttatttatgtatttacttattgagacagagtttcactctccttgcccaggctggagtgcaatggcatgatcttggctcactgcaacctccacctgtaatcctagcactttgggaggccaaggggagcagatcacctgaggttgggcgttcgggaccagcctgaccaacatggagaaactccatttctactaaaaatacaaaattagccaggcatggtcatgcatgcctgtaatcccagctacttgggaggctgaggcaggagaaacgcttcaacccggaaggcagaggttgcggtgagccaagatctcaccattgtactccagcctaggcaacaagagtgaaactctgtctcaaaaaaaaaaaaaaaaagagatggggtcttgctatgttgcccaggctggagtgcagtggctatccacaagcaatcatcacaaactacagcctctaacttctgagctcaagtgattctcccacctcagcttccaaagtagctaagactacaggcacatgccacgacctgcagctgcatagacttttttacaacctttatcttcttgattttctgccttggcaagggcagaagccctgaccacattgtttactgtacatcccatggtgtttgacacaggtgttaccacccagcaggtgctcaataaatatttgccaaacaagcgaaggaatgaatgaaggaagttagtgtccacaagacaggtctgcttcactctttgagttcggaaacaaagcagatgacaggagctggtggcacgtacactcccaaatgtccagtgccaacaccttgccctgctcttactggctggccaggtgggagctgactcgtacttcctccagctccccagcagaagctgtatggcacttcccagctgctgggaggaccccttctcattgcacagttggcctcatgacagcctcgccctactgctcttcatggtctcctgggcacacctgtggtgttagccagctcaggtaacatcatgaccagctgctaatctcaagtgttcacagaagcagctgagaaggacagcaaggaagcgttcccgtgaggccagactgggaaagcccagaaggctgaggtgcactgagctctcctgaaatatgtaaagagcacatttggctctaggaggtagtgacttagagggtcttcagcaaatgacttaaaagaggcatcctctacctgatgctttcagtgagccaggcattgtgttaagtgtttgctttgtgctatctctctgtctcctttttttagatggagtttcgctcttgttgcccaggctggagtacaatggtatgatcttggctcactgcaacctctgcctcctggggtcaagcgattctcctgcctcagcctcctgagtagctaggattacaggcgtgtgccaccacgccctgctaatttttgcatttttagtagagatggagtttctccgtgttggtcaggctggtctcgaactcctgacctcaggtgatccgcccacttcggcctcccaaagtgctgggattataggcatgagccaccgcgcccggcctcttttttttttttttttgaaacagggtcttgctctgtcacccaggctggagtggagtgtagtgacgcgatcttggctcactgcaacctctgcctcccaggctcaacccatcctcccaagtagctggaactacaggaaccctccaccaagcctggctaatttttttgtagagatggggttttaccattttgcccagggtggtcttgaactcctgggctcaggcaatctgccttggcctcccaaagcactgggattacaggtgtgagccaccatacctggccaatgtgctatatcattaaatgctcttagagccacattgaacagatgagctgctgagaaccaatgggttcagcaatgtgttcacaaccaagggttcaaatccagaactctgaagtcagagatgtacaagaataaccactggcctccctgtccctccctaccttacatgtgccttgctctgggacagaccctggaaacgctctaaagcagctcttatggtggaaatgcaacgcaagccatatatgtgttttaaaactttctagcagcccctccccacacacacacataaaaagaaacaaatgaaaatcacgttaataatatattcctggccaagtgtgatggtacacacctgtcatcccagctacttgggaagctgaggcaggagaatcacttgaacctgggaggcggaggttgcagtgagccgagatggcgccactgcactccagcctgggcaacacagagagactctgtctcaaaaaataaataaataaaataaaataaaaaataatatattccaggtcttggcaaactttcagtaagggcccagagtgagtatcttagttttcacaggccatgagaaccctgctctgtcttcctcttttgttgttgttgatttccccaatccttcaaacatgtaaaaaccatcctatttttttttttctaagacagagtctcactctgtcacccaggctggagtgcagtggcgtgatctcagctcactgcaatctctgcctcgcaggttcgagtgattctcctgtctcagcctcctgagtagctgggattacaagcgcccgccaccaagcccagctaattttttgtattttagtagagatggggtttcactatgttggccaggctggtctcaaactcctgacctcaagtgatccacctgcctcagcctcccaaagtgctgggattacaggcgtgagccactgcacccggccagtaaaaaccatccttagcttgagatctggacaaaaaagaactacaggctttgtccatgactggaaggactcaagaaacaaatagtaattcattttaaaaataattgaaggagggccaggtgtggcagctcacgcctgtaatcccagcactttgggaggctgaggtgggcagatcacctaaggtcaggagttcgagaccttcctggccaatatggtgaaacttcatctttactaaaaatacaaaaattagccgggcgtgttggcaggtgcctgtaatcttagctacttgggaggctgaggctggagaatcgctggaacctgggaggcggaggttgcagtgagcccagatcatgccactgtgctccagcctgggtggagcaagacagagcaagatctggtctcgaaaaataaataagtaaataaataaataaaataattgaaggaggagaagaagggggaggagaaaggggaagaagagaaaagaacgaggggaagaaaggaggcggagggtcagggagaaaaggagagggaagcaggaggagaagaaaaggaggaagaaagaaagaggaggttggggccgggtgcagtggctcacgcctgtaatcccagcactttcggaggccgatgcaggaagatcatgaggtcaagagatcaagaccatcctggccaatatggtgaaaccccgtctctactaaaaatacaatcattagctgggcatgatggtgcatgcctgtagtcccagctactcaggaggctgagacaggagaatcgcttgaacctggaaggcaggggttgcagtgaactgagatcctgccactgcactccagcctagcaacagagcaagactctgtctcaaaaaaaaccaaaaaaacaaaaagaggttggaaggagggagaagaaacatctactaaacccttacatcatgtggacgccatctttgctgggtaactcctcactgcagcttaaatttcactagcagagaaactcctgattccctcccctaggttcaccctacctgcctgaatgctacatacttcccccatcctccacatcatcctgttttattgtgatactttgtttcaaacttgtcttcactagttgactctaaactgcgtgaagctgcaaccaatttgcccatcctctggcatcaggcacagtttcaacgtctactagaccaataaagaatcaaagacatttaaacactggcagggccaatgtctagttagaagattaaaaaggcaaggacttactgtctccggtcctggtgtgggaatgtggctggtgcctcagccctgagtgtgcaggatgtgactgctcagtgggcacgggatacactgggatcctggggcctccagggtcccatccctggcctctggcgtccagcctccaggaagtcataggaccctctggcctcgcaggtgaccttgaaggaactgggctgaatgctgcccttctgatcagctttctcttgtttggctgcctcttggtgtccacagaagcatcattcatgttcctgactctggacagtgagcgtgtccccagggttctcccacaggagatgggcatatcagggcacaggtcttctgcagaaggctgagatgtgggtacatggtgaccacccaggatttctgtggctgcaaccaggcttagcagggctctggtgtccagatgagtaattcctcctggggagaggagagagaggagacaggatcagtgttacctcttcagtgatttagaaaactcagagccataagtatacttcagaagaggcaatcctctataagtgctccctgaataagaccccaaattgcaaacaaaccttgcaaacaaagagctagtctaggccgggcgcggtggctcacccctgtaatcccagcactttgggaggccgaggcgggtggatcacctgaggtcaggagctcgagaccagcctggccaacatggtgaaaccccccttctactaaaaatacaaaaattagctgggcatggtagtgggtacctgtaatctcagctactcaggaggttgaggcaagagaatgacttgaactcgggagaaggaagttgcagtgagctgagatcgtgccattgcattccagcctgggtgacaagagcaaaactccatcccaaacaaaaaaaagagctagtctagtgctaatctgtccaattctggaagctacaataataaaaattgaaaatagcagtcctactatttatggagtcaccagtgtatgccagcattgaccatgcttcctcccaatctttttgacaactcttgtcaatattggtaaagtttatagcagtatccctcaaggtttgattcacataggaatcatttgttaaaatgcagtttctgatacggaagatcctgcggagattcttcatgtctaacaagaccccaggtgaccattctgcttcacttcacagacctcgcagagagttcaagtggatgtatttgggcaaactgagcatttagtgactatttgctggatgaatgaatggatgggtggatgagtggacagacgatagatggatgtatgagcagatagatggattgatgagtggatggatgggtgggtgggtggatgggtggaggaatgaatgggtgaatagatggatgaatagaagatggatggattaatgaaagatggctgcatggatggaagaaggggttggtgggtgagtgcatgaatggatagatggatgagtggatgaatgcatggatgagtggatgaatgaatggatcggtgaatggatgaatgggtgggtgggtggatgcaggaatgagtgggtgaatagatgaatagaagatggatagatgaatgaaagatagtcatctttattaaatatcggatgaatgaaagaggcaagttcccccataagcctctgaaatgtggttattagaaaataattgtgtcctggaagccagctcagggccaggcacatcataggttcttagaaataaacaagcaccttggcacttgaaaaaaatgtccaaggcatgaaggttattctcacatttttctcttctctcctaaagcaagttgtaagactctcatgtgagagcagccctccctatcccgggaggagaggaacatcttatctctgaagacacaggacacagagaagaatctgaacaaacaggcctggctaagttcccccagtttactggcagaagatcctttctttttttttttttttttgtttaacccaatcctacttctctatgactatccacctctttatcagacctagcataaaaaattacacaggttggccaggcgcggtgactcacctgtaattccagcattttgggaggccaaggcaggtggatcatttgaggtcaggagtttgagaccagcctggccaacatggtgaaaccccatctctactaaaaatacacaaattagtcagtgattacaggcatctcagcccttttagatcatgctcaccaagcatcctccctggccactgcatggtttcaataacctcccacgcacttgtaacatccaaacctataactccagccccgctccagaatcaaatactcagctaccctgtggagatagctgaccgactccaagcctaatatgggtgtgacagagccgatcactgctctaggtgccgcttttcctctcttgctgaatgattccaacatccacttatttgccccaaactcctagagattactccatcttcttccctcatcctcagccccaaatactatatttccttcatataacacctgctgtcatttacggtaatcactaactggagcccctaccccccaataaccttagagctctgcaaacaaacagatgtggggaaccagactacgccaccccaaaatatgcccctttagcataaggactgttgaactgaaggcaattaagaagtgggcatgggctggacgcagtggctcatgcctgtaatcccagcactttgggaagccaagagggtggatcacttgaggtcaggagttcgagaccagcctggccaacatggtgaaaccccgtctctactaataatataaaaattagccaggcatggtggtaggctcctataatcccagctactcgggaggttgaggcacaagaattccttaaacccgggaggtgggagttgtagtgagccaagactgcaccatggcactccaggctagagtgagactctttctcaagagaaaaaaaaaagtgggtgcagaaaggctctctatcctctttccatttgcccaaaagcaaatagagacacaggacagagagctgactgtacttggaaattgctaagagagtagattttgggggttctcaaaaaaaagtatgggaagtaatatatatgttttgttttgttttgttttgtttttgagatggagtctcaccctgttgcccaggctggagtgcagtggcacgatctcggctcactgcaacctccgtctcctgggttcaaacgattctcctgcctcagcctcctgagtagctgggattataggcacccgccaccatgcccggctaatttttgtatttttagtagagacaaggtttcatcatgttggccaagctggtctcaatctcccgaccttgtgatctatccgtcttggcttcccaaagtgctgggattacaggcgtaagccaccgtgcccagccagtaatatgtatgttaattagctcaatttactcagtccacaatgtatacaaatttcaaaacatcatcttgtatatcataaatatatacaatgctttgtcaatgtaaaaaatgaaaaagtgccgggcacagtggctcacgcctgtaatcccagcactttgggaggccaaggcgagcagaccgtttgaggtcaggagttggagaccagcatggccaacatagtgaaaccccgtctctactaaaaatataaaaattagccaggcatggtggtgagcgcctgtaatcccagctactcgggaggctgaggcaggagaattgcttgaacccaggaagcggaggctgcagtgagcccagatcatgccaccgcactccagcataggcgatagagcaagactttgtctcaaaactaaaacaacaacaataacaaaacgaacacaaaagaaaccaacgaaaccctaactcaatgcactccaacctgggcgacagagcgagactccatcttaaaaaataataaataaatacaaaattcaaaattacacacctggctcacatatttccacactgggtactgctatcttgtaagtatccacattttacaaagaataagattgaagacacagagaggctaagctcccagtgtaacacagctgattagtagcacagctgagacttaaacccagaccacgtggtttcaaagtcagaggacctagccactaggctacactgctgaatgctgttgcctccatatgcttcatccattattgtgggaaggggtaactgaggatcagatacctgctccccaaggaagccctttcacctcgattgtccaccctggacaggagttgagcaacatgtttggacttgtctgcctctcccctgcagattctcaaccagggctgatgtcaatcttcttcattcacatcacacaagcaaaaggaaactatttgtgagtgtcaggtggaagaaaaagtaaggtgtggaacaaaaaacaattgtatttctggatggttgcgtttcaaataaacgaaactcactctctgtgagtgtggcccgagggacagaaccagggtcaccacccggcttccagaaacacctatttccagcagaagcgccctcaacggatcagggtcactgggattcaagacctggccccttcctaggactttaggggctggcctcccagggagaagatagaagaggaaggtgagctcttttctttgtctttttttagaacacttctatctggagccacacgcccctgtcactaacgccacaccgacccacagtcagagttactcatggtcagactcaccctaaacctatcctacacgcccagatgcagccattcccaagcccttacccaccgctggtatgctccctcagggacgtgcagcctcagagatatacttcaacagcatcttcacacaaccccccgaccctctgagacccacctgcttacaaacatacaaccagttatttggccctacaacagcatcattttcttttctttccttttcttttaatttaataattgcaagggagcttcgtagttctgtttctggtcacatattcccttgcaaatcatgccataaaggctgggtgcggtggctcacgcctgtaatcccagcattttgggaggctgaggcaggtggatcacgaggtcaggagttcaagaccagcctggccaacaaggtgaaaccccgtctctactaaaaactacaaaaaaattagctgggtgcggtggcaggtgcctgtaatcccagctactcaggaggctgaggaaggagaatcgcttgaacctggatggcagaggttgcagtgagctgagattgtgccaccgcattccagcctgggcaacaagagtgaaactgtctcaaaaaaaaaaaaaagaaagaaagaaagaaaaaagaaaaagaaaaggagaaagaaaatcatgctgtcgtcatgcctgtaaccctgcactttgagaggtcgaggcgggtggatcgcttgagcacaggggttcgagaccagcccaggcaacatatggagaccttgtctatacaaaaatacaaaaattatctgggggtggtgtcgcgtgcctgtagtcccagctactcaagaggctgaggcaggaggatcgcttgaggtcaggaggtccaggctgcagtgagctgagatcacaccaccgcactctagcttgagtgacagcctctcgagtagctgggactacagttgcgtaacaccacacccagctaatttttctatttttgtagagacggggtctccccatgttgcccaggctggtcttgaactcctgggttcaagcaatccactctccttggcctcccaaagtgctgggattacaggtctgaggatggcatcaagggaatacatgactagaaacagacctccaaacctcccttgcaatgattaaatctaccctccacattgcaagtcacccctttataggataaaagctttaaggaaacatgaccgggcgcggtggctcacacctgaaatcccagcacttagggaggtcaaggtgggtggatcacctgaggtcaggagtttgagaccagcctagccaacatgatgaaaccccacctctattaaaaataaaaaacttaggcaggcatggtggcacacacctgtagtcccagctactcaggaggctaaggcaggagaatcgcttgaacccgggaggcggaggttgcagtgagccgagttagtgccatgcactccagcctgggcaacagagcaagactccgtctcaaaaataaaaacaaaacaaaaaacaagaaacatttattttctcacataattcgtgtgagccaggagttgaagggcagcttagatgggtgcttagtggctttcaagaggttgaagtcaaatgtcctctggggctgcagtcatctgaaggcttgatgtgggctggaggatccagttccaaggtggctcattcatttgcttggcaaattagtgctggttgtgggcagaaaacctcagttcattgccatgtaggcctctctatagagctgcttgagtatcctggtgacaatatggaagcagtcatgtcttttatgatgtaaattagtgccaggagctgggcacggtggctcactcctgtaatcccagcactttgggaaaccgaggcgggcagattgcttgagttggagacaagcttgggcaacatggcgaaaccccacccctacaaaagatacaaacattagccaggcttggtggcgtgcacctgtagtcccagctactctggaggctgaggcaggaggattacctgggaacctgggaggcggaggttgcagtgagccaagatcccagcactacactccagcctgggtgacagagggagacttcatctcaatcgatcaataaataaattaggtacaggtgtggacgatggtcctcaggtattataccttaaacaccttgagtacgacttctcttgatctaaagaccaataaatttgccttcactcactcttctttctttttgaagttccgggcttctctttgatatcatttcccttcagcctcaataactctctttactgtttcttttagagcaattctgttgatgatgacttcttttcattttcttttacctatttattttactattgttcctcctagatattttcactggtatagaattcttagtgaatcgtcatgttctctcagcattttagaaacattgttccattgtgttctagagtccatggtttccagtgagaaatccagtcattcaaatcattgtttgctagagggtgtttggtgtttggtgtttttcttttttttaagagatggggtctcgctatgttgcccaggctggactcaaactcttgggctcaagcgatcctcctatctcagctacccaaatagctgaaactacggacatgtactgcgttattaattcaagcctctgcattttggggtcgtttcttctataacaatagataactgggacaggcgcagtggctcacgcctgtaatcccaacactttgggatgccaaggtaggcagatcgcctgaggtcgggagttcaagaagagcctgaccaacatggagaaaccccatctctactaaaaatataaaattaactgggcatggtggtgcatgcctgtaatcccagcactttgggaggccacggccggtggatcacctgaggtcaggagttccagactagcctggccaacctggtgaaaccccgtctctactaaaaatacaaaaattagctgggcgtggtggcaggtgcctgtaatcccagctattctggaagctgaggcaggagaatcacttgaacctgggaggcagaggttgcagtgagctgagatcgcaccactgcactccagcctgggcgacagtgagactccatctcaaaaaaaaaaaaaaaaaaaaaagtgtggggattacaggcagagccaccatgcctgctgtctgtgtctgttttgttgagccaccaacaggctgttaacttgagtacatttcttctgctctctgacttagtgtactcatctggaaaatgggggtgaatgtgctcccacactgctgagctgtagagggccttaaatgagttaatctctccctgaaatctctctgtgaatggcccaaccgtaatcagattccgtaaagggtagctgtggtcattcttcttttttccctcctcccctcttccactcattctggtgacccaagatttcccagttctttacctatgactcaccccacctcagagctttttctttttctttttttcttgagatggagtcttgctctgtcacccaagctggagtgcggtggtgtcatctctgctcactgcaacctccgcctcccaggttcaagcaattctcctatctcagcctccagaacagctgggattacagatgcacaccagcacgcctggctaatttttgtatttttagtagagacagagttttaccatgttggccaggctggtctcgaactcctgacctcaagtgattggcccaccttgacctccgaaactgagctttttttttcccttccttttttttttgagacagagtctcactctgtcgcccaggctggagtgcagtggcgcaatctcggctcactgcaacgtctgcctcccgggttcaagagattcacctgcctcagcctcccaggtagctgggattacaggcgagcaccaccacgcctggctaatttttgtattttagtagagacagggtttcaccatgttggccaggctggtctggaactcctgacctcaagtgatctgcccgccttggcctcccaaagtgttgggaatacagacgtgagccaccacgcccggcccagaactttttcttacaggcctcttggaccacctgacccagatacaggacatttcctacaactccagaggaaaatccccttcttccttcctctacggaagtgaccgagagaaagtaacactcactgtttcctctcttccagacccttctgaaaattctaattccagaaagctcatcttataaaccaaaaataaaattctaagccccctaaccgacttcatagacccctcttttggccaagaggatcccaaaggaacctgaaaaactagttcagcccatgataaggagaggatttggacatccctcattgtacccctccctttggagtttaagcacaactgactagcattaacattaaaacagaggcccagagagttggccaatatattgtctttttgtttgtttgtttttgagacagagtttcgctcttgttgcccaggctgaagtgcagtgatgcgatctcagctcactgcaacctccacctcccagatgcaagtgattctcctgcttcagcctcccaagtagctggaatcacaggcacgcaccaccacgcccggctaattttgtatttttagtagagacggggtttcaccatgttggccaggctggtctcaaactcctgacctcacgtgatccacccaccttggcctcccaaagtgctgggattacatgtgtgagccaccatgcctttttgcctttctaacggagcccctggcaaattcaaaaactgttttgctctctgtctgcaagtctccctggcagatccctcagttatattcgtacccaccccttgaatgctgtggcttccagagatccaccggaacaccaaagacttccattctcaaccacctgaatctccggaatcccctgcacccacctcctctcccagtgtttcacgaatcagctaatccttcaaggtctttaaaatgtatccacgtcttcctcctggattattgcctcctgatagcctctctgatttctttccaccttgtgccctaacagtctgctctttgtacagcagccagaaggaggctgtgaaaaataagagtcaaagcatgggctgggcgtggtggctcatgcctgtaatcccagcactttgggaggccatggcaagaggactgcttaggcccaggagttcaagataaacttaggcaacatagcgagaccctgtctctacaaaaaaaaaaaaaattaaaataggccaggcgcagtggctcatgcctataatcctagcactatgggaagcagaggcaggcagatcacctgagttcaggagttcaagaccagcctggccaccatggtgaaactttgtctctacaaaaatacaaaaattagctgggcatgatgacgggtgcctgtaatcccagctactcaggaggctgaggcaggaaaatcacttaaacccaagaggtggaggttgcagtgagctgagatcatgccattgaactctagcctgggcaacagagcaagactccatctcaaaaataaaataaaataaaaaatgagccaggtatggtagtgcacacctgtagtcccaggtacttgggaaactgaggcaggaggatcacttgagcccaggaggttgaggttgcagtgagctgtgatcagccactgcactgcagcctggggcacagagcaagaccctgtccaaaaaaaaagaaaaagaaaatgatagaccagagcttaatgtctttccatggttctgcatatatgtcagagtcaaaactaaattccctccaaggacctattggtttgtccctgcccttatgtccctccccagattccttctctcccacctcgttcactctgtttcagctgctctggtttacttgctgtttctcaaactcactcctgcctcaagtcccttgcatttcctggaacatccttccacctacccaaatacctaaatagttccatcctcacttcattaagtcctctgctcagatgtcacctcttcaaagactgtgctacctcacccctgaaccctgacacccactacctctcttgacattgtaggtgctcagtaatgtttgtgggatgaaaacatgatggaaaagagcttctgctcaaagctttttctccttttttctttctctccttccttccttctttccttccttcctgttttttttttttctttttctttttttttttttgatacatagtctcgctctgtcacctaggctggagtgcaacggcgcgatcttggctcactgcaacctccgcctcctgggttcaagcgattctcgtgcctcagcctcctgagtagctgggattgcaggtgcccgccaccatgcccggctaatttgttgtatttttagtagagacggggtttcaccatgttggtcaggctggtctcaaactcctgacctcaggtgattcatcctcctcggcctcccaaagtgctgggattgcaggcatgagccaccacgcctggcccttccttccttcattccttccttcctccctcccttccttctttctttctctttctttcatcttccttccttctctttctttctccctttctgcttccttccttcttttccgtccttccttctctttctttttctctttctccttccttccttccttcctccctgcctccctccctccctctttttctctctctttctctctttctttcttccttgttttgccatgttgcccaggctgctcttgaacttctgggctcaagggatcctcccagctcagcctcccaagtagctaagactataggcacgtacaaccatgcctagctaatgttttgtatttttagtagaaatggggttttcccatgttgcccaggctggtcttgagctcctggactcctggactcaagtactcttcccacctctgcctccaaaagtgctagggttacaggtgagagccactgcgcctggccctctctctctcatctcagatttttctctccaccttagccactcccagatgttctcctcactcctgtctccttccgttgaaaaaccaccctcaagctactggtggatgaagggtgtggaccaccccacccctggatcaaacccccaagccccacctctatcacccacagctatatttccttgagcaagttgcttaatctctccaagcctcagtttcctcaactacaaaacatatacaaatagaaagtgatacatgactgcttcattgtagtaaccattgcaccatctgcatgtatcccacaatgtcatgtagcaaacaacaaaaattattaaaaagaaaaaaagacgatctgatctcacagatctgttaagaggattaaatgggattattcatgtaaagctctccatttgtgatgtcatagtgtaaatatcaaattaacggtggaacgagctgttgtaatcaattcttatctaaatacgaccaataataacaatgcttaatgtgattattactaaccatagttgtatttcctcttatattaacctcttagtctctccttaccatattatagatcatcaataaatatttattgaatgaacgattgaatgaatggttattgaatttttgtaaggaggaaaagatcacggacttcttataaaaaatataaaagtcagtccagatgcgatggctcatgcctgtaatccagcactttgggaggccgaggtgggctgatcacttaaggtcaggagttcgagaccagcctggccaacatggtgaaaccctatctctaccaaaaaaaaaattagccaggtgtggtggtgtgcacctgtaatcccagctactcgggaggctggggcaggagaatcacttgaacccaggaggcagaggttgcagtgagccgagatcatgccactgcactccagcctgggcaacagagtgaaactccgtctcaaaaaaaaagaaaaagaaaagtataaaagccaggtctgtggccaggcacaatggctcaacacctgtaatcccaagactttcagaggccaaggcgggcagataacttgaggtgaggagtttgagaccagcctggccaacacggtgaaaccctatctctactaaaaatacaaaaaattaggccaggcttggtggctcgtgcctgtaatcccagcactttttggggccgaggcaggtagatcacgaggtcacgagctcaagagatggagacaatcctggccaacatggtgaaaccctgtctctcctaaaaatacaaaaattagctgggtgtggtggcgcgcctgtagtcccagctacgtgggaggctgaggcaggagaatggcttgaacccaggaggcggaggttgcagtgagccgagatcacaccacttgcactccagcctggtgacagaacaagacttcgtctcaaaaaaaaaagaaaaattagccaggcatggtggtatgtgcttgtaatcccagctactagggaggctgaggcaagagagtcgtttgaacccaggatgcagaggttgtatgagctgagatcacaccactgcactccagcctggaggacagagtgagactctgtctcaaaaagaaaaaagaaacaaacacaactgggtcaggcaaggtggctcacacctataatcccagcactttgggaggctgagatgggaggattgcttgaggccaggagtttgagacccacctgggcaacatggtgagaccccaatttctactaaaagtataaaaattagtgccgggcacagtggctcatgcttataatcccagcactttgggaggccaaggtgggcaggtcacctgaggtcatgaattcgagaccagcctgaccaaaatgatgaaaccctgattctactataaatacaaaaattagccgggcgtggtggcactcgcctgtaatcccagctacttgggagactgagacaggagaatcacttgaacccgggaggtggaggttgcagtgagccgagatcgcgccattgcactccaggctgggcaacaagagcgaaactccatctcaaaaaaaaaaaaaaaattagccaggtggcagggcacagtggctcacgcctgtaatcccagcactttgggaggccaaggcaggcagatcacaagatcaggtgtttgggaccagcctggccaacacggtgaaatcccatctctactaaaaatacaaaaattagttggacgtgttggcgggcgcctgtaatcccagctactcgggaggctgaggcaggagaattgcttgaacccgggaggtggagtttgcagtgagccgagatcacgccactgccctccagcctgggtgacagagtgagattccatctcaaaaaaaaaaaaaattagctgggcatggtggtgcgtgcccatagtctcagctccttgggaggttaaggcacgagaatcgctggaacccaggaggaggaggttgcagtgagccaagatcgtgccactacactccagcctggctaagagagagactctgtctcaaaaataaaaacaaaagagttattggcctggcgtggtggctcacgcctgaaatcccaacactttgagaggccaaagcaggtggatcggatcatctgaggtcaggagtcagagaccagcctggccaacatggcaaaaccccatctctactaaaaaaatgcaaaaaatagccaggcgtggtggtgcgtgcctgtaatcccagctacttgggaagctgaggcaggagaattccttgaacccgggaggtggaggttgcagggagctgagatcgtgccactgcactccagcttgggtgaaagagctagactctgtctcaaaaaaaaaagaaaaaggttcttgtaaggactctgtgagatggaccacaggcatgggtctcggcacaatctgtttgtttgtttgtttgtttgtttgtttgtttgttacggagtctcgctttaccccccaggctggagtgcagtggtacgatctcggctctctgccacctctgcctcccgggttcaagtgtttctcctgcctcagcctcccaagtagctgggattacagacacccaccaccacgcccggctaatttttgtttttttagtagagacagggttttgccatgtttcccgggctggtctccaactcctgacctcaagtgatccgcccacctcggcctcccaaagggctaggattacagaagtaagccagtgcacctggccagcacaatcgttcttgctccctagatgtgaactgctgttttcaccagcaggagctaaggggcaggctgtctcagattagatgctttttagagcactctgtagttccttaaatggagctgcaaatccacaggttgctgctcaatgtctgactagcttctactttatttctgactttatttctcatctgtctccaccacacccctcccttccacataccctgcattccagcaaaactgaccaatgcatcacatgccagacacaccctgtgatgtctaccccaggacccttgcacaggcttctgcctcaagagagctcatgatccagtggacaggcgtgggcattggaatctcacaagcccagatcacctcccagtttcacctcttcaatgctattgacctttggggactgacaaaacctctctgaacttcagtttgcccagatatagcatggactgaaaaaatgtgtaccttctaggtacaagtcatgcctcactcagcaacggggatatatcctgagaaatgcatcactaggcaattttgtcattgtgcaaataccatagagtgtacttatacaaacctacatggtatagcaactacacacccaggctgtagggtatgacctctagattttacatatatatatatatatatatatatatatatatatatatatatatatatataaatatatatattttttttttccagatggagttttgctctttcgcccaggctgcagtgaagtggcacaatctcagctcactgcaactgctgcccccaggttcaagtgattctcctgcctcagtctccccagtagctgggattacaggcacctggcacctcacccggctaattttgtacttttagtagagatggcgtttcaccacgttggccaggctggtctcgaactcctgatctcaggtgatccacccgcctcagcctcccaaattgctaggattataggtgtgagccactgcgcccagccttaaaatttatattttaacttaaaatatatttacaactagagatgggtctcactatgttgcccaggctagtcttgaagtcctgggctcaagtgatcctctcaccttggcctcccaaagtcctgggattatggatatgagccactgcaccaggccaatgataagcgtttgtgtatctacatgtatttaaacatagagaaaggacagtaaaaatacagtattacaatctcttgggaccactgtcatatatgcagtctgtcattgactgaaatgttgttatacagcacataattgtactgaatgaggattaaagctaatgggacatttagccaggtgcagtggctcacgcctgtaatcccagcacttgggaggccgaggtgagcagatcacctgaggtcaggagttcgaggccagcctggacaacatgttgaaacccctgtctctactaaaaatacaaaaattagccgggcgttgtggcaggcgccaactactcgggaggctgaggcaggagaatcagttgaactcaggaagcagaggttgcagtgagcagagatagcaccactgtaatccagcctgggcaatagagtgagatgctgtctcagaaataaataaataaataaataagtcgggcgaggtggcttacgcctgtaatcacagcaccttgggaggccaaggtgggtggatcacgaggttaggagttcaagacccgtctggccaagatggtgaaaccccatctgtactaaaaatacaaaaattagccggacatggtggcaggtgcctgtaatcccagctacccaggaggctgaggcagagaattacttgaacccagtaggtggaggttgcagtgagccgagattgtgccactgcactccagctttggcgacaaagtgagactctgtctcaaaaaaaaatatatatatatatttatatatatatatacacacacacatatatacttacaatacataataatattaataacatgatataaatattaacaacttagtataatgatagtaaggatttaccatgtcaggcatctttccaaaaactcttaatatattaaatcatagaattctcacaacaacttttttttttttcaaacggggtctcactctgtcacccaggctggagtacagtggtgcgatcttggttcactgcaaccactaactcctgagttcaagcgattctcctacctcagccccctgagtagctgggactacaggagtgcactaccatgcccagctagtttttgtgttttaagtagagacagggtttcaccatgttggccaggctggtctcaaactcctgatctcaagtgatctgcccgcctcgacctcccaacgtgctgagattacaggcacctggcaccgtgcccagctcgtttttgcatttttagtagcgatggggtttcaccatattggccaggctggtctcgaactcctgacctcaagtgatctacctgccttggcctcccaaagtgctgggattacaggcattatctactgcaccaggccctcacaacaacattttgatagtactattattaagctcatttcacagatgaggaacctgagagaggtaaggagaagtacaataatctgcctaaggtcgtcgtggagctactaattggctaagcagctcctggaagtctcgctagagagtgtcactgtttaatggaccgttggacatttcctaagccttgggtgtgttttacatcattcactagccatgcacagctagtgagctcttgcaatgcagctactggggctaccacagttgtagccataatgctatgtactatgggtgaggaacttaattttttttttttaatttgtattagccaagcatggtgatgtgcacctgtagttccagctactcgggaggctgagatgggaagatcgcttgagcctaggaggtggaggctgcagtgagctgtatttgtgccattgcactccagcccgggtgacacaatgagatcccatctcaaaacaaaaaccaggtcataggtagataaagagacaaaaggttgccttcttttgagtttctgatgagcctctccaaaggagccaatcagatatgaatgtatctaagtgagcacaggagggactctgaatagaatgagaggcaggttggccctgagcagttcccagcttgacttttcgctctagcttaatgattttgagaggtgaagcccgctgggcttctgggtcaggtggggacttggagaacttttctatttagctaaaggattgtaaacgcaccaatcagcattctgtgtctagctaaaggtttgtaaatgcaccaatcaggactctgtaaaaacacaccaatcagcgctctgtgtctagctaaaggtttgtaaacgcaccaatcagccctctgtaaaaacatacctatccgcgctctgtaaaaacggaccaatcagccctctgtaaaatggaccaatcagcgatctgtaaaatggaccaatcagcaggaagtggttggggccaaataaggtaataaaagctggccatctgaaccagcagtgccaacctgctcatgtccccttccacattgtggaagttttgttcttttgttcttcataataaatcttcctgctgctcactctttgagcccacactacttttatgagctgttaacactcactgtgaaggtctacagcttcactcctgaagtcagccagaccaggaacccactggaaggaagaaactccggacacatctgaacatctgaaggaacgaactcgggacacaccatctttaagaactgtaacactcactgcaacggtctgcggtttcattcttgaagtcagcaagaccaagaacccaccggaaggaaccaattccggacacaatctggggaccccgaaatttactttcccttcacagtcccctccctcttccttctttctcctcctcacttcctttgtctctctcccctttctcctcactcttccctcatctgattctctctccatctgtctccttttttgttgttgtggtggtggttgttgagttggagtctcactctgttgcccagtctggaggctaatggcatgaccttggctcactgcaacggctgcctcccgagttcaagcaattcttctgcctcagcttctcaagtagctgcgattataggcacgcacctggataatttttgttttgttcttttttttgatggagatggggtttcactgttttccaagctggtatcgaactcctgggtgcaagtgatcctcccgcctccgcctcccaaagtgctgggattacaggtgtgagccactgcccccagttccttctctctcttctgtctgccgcttctcatcccttccacccaaccagggcgggagagggagggggatgaaaccaggacggggaggtgggagagggatgaaaccagggcggggaggtgggagagggatgaaaccagggcggggaagtgggagagggattacaaactccctctatttactctcaagcttctctgtttccacctccactaaccctggaaccctgaggcgccccaggcctgcagtgtataaatgccttcctggcaggccttgctgagacttgagctcagcagtcctcaccctccttaatcctaaccaaacaggatctgtcactaggctcagcgtgcagaggacgcctcgggtccttttcctcctgcgaaaccacagaggcagccctaggggcaaacaataaaacagtgtggagggctgggggatgagggtgggagcatgcctggcagggaacgtttctttttttttcctccttcaaaaattggaggggaggcctggcgcggtggctcacgcctgtaatcccagcactttgggaggccgaggcgggcggatcatctgaagtcaggagttggagatcaaccagaccaatatggtgaaaccccatctatactaaaaatacaaaaattagccaggtgtggtggtgggaggctgtagtccgagctactcaggaggctgaaacagaagaattgcttgaacccgagagttaggtggcagtgagccgagatcgtgccattgccctccagcctgggtgacagagtgagtctcaaacaaacaaacaagcaaaaaaaaaaaaaaaaaacaaggaaggggatcaaaactgtcagttgggacaaatacaggctttactatggtaattctctggctttgagccaaggactgcaccctccccagggggcagcgctgagagctaagtcacccaggatggtttaaaattaaactcaattttcaacattgtaactcctcacagacaaacacaactgtgtttactaatagcatttctcggttttatctgacttttgagttctgaagtcgggagatgtggaggctggaagtataaactgagacgaagtgggcagaacagctccctcccggcttccccatccccagccagcctctctgattttctttttctttctctttttcttttttttttttgagatggaggcttgctctgtcacccaggctggagtgtagtggcccgatctcagctcactgcgacctctgcctcccagactcaagtgattcttctgcctcagcctcccaggtagctgggattacgggcacgcgccatgatgccaggctatttttttatttttatttatttattttttaaagtagcgatggcgtttcaccatgatggccaggctggtctcgaactactgacctcaggtggtccgcccacctcggtctcccaaaatgctgggattacaggcatgagctcctgcacctggcccagcctctctggttttgatctaagtcatgcccaaagcttggaagcggctttacactacctttctttgctcaaaaatttgccatccatctatctgtctgtccatgcaataaatatctagtgatctaatagaggctgaattctgtgctaaaagctaaggattatggtattatttatttatttatttatttatttatttattttgagacggagtctctctctgtcacccagaccggagtgcaatggcgtgatgtcggctcactgcaacctccacctcccgggttcaagcaattcttctgcctcggcctcccgagtagctgggattacaggcgtgccccaccatgcccaactaatttttgtatttttagtacagatggggtttcaccatgttggccaggctggtctcgaactcctgacctcgtgatccacctgcctcagcctcccaaagtgctgtgattacaggtgtgagccatcgcgcccggccctattattactattactactataacaataaaaacagcaatttatttatttatttattgcaagacagagtcttacactgttgcccaggctggagtgcagtggcagatcacggctcactgcagccgcaacctcccaggctgaagctatctttctgcctcagcctcctgagtagctgagaccacaggtgtgtgccactatgcctagctagttctttaatttttgtagagatggggtctagctatgttgccagggctagttttgatttttttttcttgtagaggtagggtcttgctgcattgcccaggctggcctcgagctcctgggctcaagcgattctctcgcctcaggctctcaaagtgctgggactttggctgggattacaggcgtgcaccatcatgcctggctaatttttgtattttttgatagagacatgatttcactgtgttttcccggctggtctcgaactcctggcctcaagtgatcctcctgcctcggcttcccaaagtggtgggattacaggcatgagccactatgcccagctccatctctctcttctatctgctgctacttctagaatacgtagtgggcgcagaatagggactatttaagtgtttgctggccagacatggtatcccatgcctgtaatcccagtactttgggagacacatagcccctattctgtacccactacgtattctaggagttgtttatttagtccttctagaaacatttcaaacctgatgtggtggctcacgcctgtaaccccaacactttgagaggctgaggcaggagaatcgcttgaacccaagagtttgaggccaggctgagcaatgtagcaagaccctatctctgcaagaaaaaaaaaatcaaaaaattagtcaggcatagtgatgcacctctatggttccagctacttgggtggctgaggtgagagcattgcttgaacccaggaggttgaggcttcagtgagctgagatcaccttgccactgcattccagcctgggtgacacagcaagaccctgcctcagaaataaataaataaataaataaataaataaataaataaataaataaaaacccttctacatctcccattttatagaggaggatacagaggttcagagaggcccccaagtcgtatggctgagctgggatttgaacccacaatgatgggtgctcttcaccaccttgcagcttgccactctcatgaaaaacatacagtctggtgcggcacacatgataactacacaaacaaggtaattcagatatttaaatgctctaaagattctacatcaggttatttccagtattattttcctggtcatccctggaaggatgagaaggaaccaaccttcagaagagctgcagagagaacacccagacagagtaaaaagcaagtgcaaaggccctgtggtccaaaccacttaaaaagatttggaagcagcagaggtcagagtagcaggaaggaagagacaagaggcaacagagcaggatatgatgatttcaggccacagggggagtttgggtttcgttgtttcttttttgagataggttctggctctgtttcccgggctggagtgcagtggtgcagtttcagctcactgcctatcttcacctcccgggtcaagccatcctcccgcctcagcctctcaagtagctgggattacaggcatgtgccatcacgcctggctaattttttttttttttttgagacagagttttgctcttgttgcccaggctggagtgcaacgatgcgatctcggctcactgcaacctccgtctctcaggttcaagcgattctcctgcctcagcctcctgagtagctgggattacaggcatgtgccaccatgcccagctaattttgtatttttagtagagacggggtttctccttgttggtcaggctggtcttgaactctcgacctcaggtggtccacccgcctcagcctcccaaagtgctgggattacaggtgtgaaccaccgtgccaggctttaattttttttttttttggagatggagttttgctcttgttgtccatgctggagtgcaatggcgtgatctcggctcactgcaacctccgcctcccgggttcaagcgattctcttgcctccgcttcccgagtagctgggattacaggcgcctgccaccatgcctggctaattttttgtatttttagtagagacggggtttcaccatgttggccaggctggtctcgaactcctgacctcaggtgatccgcccgcctcggcctcccaaagtgctgggattacaggcatgagccaccgtgcccagccgttaatatttgtattgtttgtaggggcatggtcttgctatgttgcctaggctggtttgggttttatccccagtaggacaggattctaggagcacagcagggatggggtggccattttacaagcactccaggggtggggttggtaaaagcgtcacgtcccagctgtcctccctctaggatgtttatcacccctgtcctgcaagatctaattctatgatgtctttgctgcccctgaatgacaacaacaaggcagattaccccaactctttcccctctgctgtatatttaagcacctcccctttgactttatatcctggactagtctgtgtaaagacaaagaaaaacgagaaacaagaggcttaattcttcctgtattctggtttcggggaagggtcaaaatataacttcagtggatgccttgctccaaattgcaaaactccctcctgtcatgatgaaagatgtgtttttcccctggataaagccaattagctcacaccgtcgtcacaatgactaggtggctccaggatgaactatgcgtttgataaacggtgctgtcaagttctgttactggagaactaatgattatttatcatgaggcatgaaggtgacaggtttatctgcttggctatagaaaaagggtgagatgtaggctggacacgatggctcatgtctgtaatcccagcactttgggaggccgaggtgggcagatcacaaggtcaggagctcgagaccatcctggcaacacgttgaaaccccgtctctactaaatatacaaaaaattagccgggtgagatggtgggcgcctgtagtcccagctactcgggaggctgaggcaggagaatggtgtgaacctgggaggcggaggttgcagtgagccgagattgcgtcactgcactccagcctgggcgacagagcaagactctgtctcaaaaaaaaaaaaagaaaaagaaagagggtgagaggcaggctggacacggtggctcatatctgtaatcccagcacttagggaggatgaggcaggcggatcacttgaggctaggagtctgagaccagccatggtaagaccccatttctactaaaaatacaaaaatgagggctgggcatggtggctcaaatgcctgtaatcccagcatattggaaggccaaggtgggtggatcgcttgagttcaggagtttgagatcagcctggccaacatggcaaaaccccgtctctactaaaaataaaaaaattagccagacatggtggcgggcgcctgtaatcccaaaaaaaattagccagacatggtggcgggcgcctgtaatcccagctactccggaggctgaggtggaaggatcatttgaaccggggaggggaaggttgcagtgagccaagttcacaccactacaatccagcctgggcgacaaagcgagactccgtctcaaaaacaaaacaaggccgggtgcagtggcgcatgcctgtaatcccagcactttgggaggctgagatgggtggatcacaaggtcaggagatcgagaccatcctggctaacacggtgaaaccccatctctactaaaaatacaaaaaaattagccgggcgtggtggtgggcgcctgtagtcccagctactcgggaggctgaggcctgagaatggcatgaacccgggaggcagaacttgcagtgagccgagattgtgccactgcactccagcctgggcgactgagcaagactctctcaaaaacaaaacaaaacattagctgggtatggtgtctcttgcctgtaatcctagctactcaagaggctgaggcaggagaatcgcttgagcccaggaggcggaccttacagtgagctgagatcactgaactgcactccagtttgggcgacagagcgagactctgtctcaaaaaaataaataaataaaataaatgaaaaagggcaagatttctttctgcctttgcaatgtcctaggccttatctacgacgtgcaccacactctggatgaatgcttattcagtgataacattaaggggtatttttttcctttcccttctacttttgtggagaggtttcctgagttgagagaagattcttgcatttagttgtatttccacaacatcagcacgtcctacattttttaaatctgcccagccagcctgaatttcaggaagccagagaggccctagttggttgctcttatttatttacttagagacacagtctcactctgttgccccaagctggagtgcagtgatggaaatctccgctcactccaacctctgcctcgtggattcaagtgattctcgtgcttcagcctcccgaggagctcggattacaggcactgaccaccacacccagctaatttttttgtatttttagtagagatagggtttcgccatgttggccaggctggtctcgaactcccaacctgagttgatctgcccgcctcggcctcccaaagcgctgggattacaggtgtgagccacggcgcctggcctgttgctataattttagagaaacacagtgggctctatcattagtcctgggttcaaatcctgtgtggtcctggataggccactcaaattctgcctgtttcctctctagtaaattagggttacgtctgacagcatctattttggagagtcattgctaggactaatggtgacaaagagcttaatacagatcctagcccagatcaaacaattttagttaatagtaataaccaccttgcttttaggatagctgagactcactgggccagcaccatgccaagctcctatcttagtaacaatgaaatgaggcctacctttacaataaaagctaacatatcctgttggccatgtggcaggcactgggctaattcctttttagttttttaaattttttagagacaggatctggctctgtcacccaggctggagtgcagtggcatgatctcagctcactgcaacctctgcttcctgggctcaagtcaccctcccaccgcagcctcctgagtagctgggactacaagggtgcaccaccacacctggctaatttttgtattttttgtagagacagggtttcgccatgttggccaggctagtcttgaactcttgagctaaagtgatccgcctgccttggcctcccaaagtgtggaattacaggcgtgagtcaccgtgcctggctgtctgcctttactttctttctgtcctttttttttttttttttttttttgctttgagacagagtctcaatctgttgcccaagctggagtgcagccgaacaatcatacctcactgtagcctcaacctcctggacccaaatgatcctccgacctcagcctcctgagtagctgggactacaggcacgtaacatcatgcctggctaatttttattttatttttagtagagaaggttttgctgtattgcccaggctgttctcaaactactgagctcaagtgatcctcccatcttggcctcccaaaatgttgggactgcaggcctggctaattaaaaaaaaatttttttgcagagatgggggtctcacaatgttgcccaggctcgtcctgaactcctgggctcaagcaattctcccacctcggcatcccaaagtactgggattacaggcaagagccactgcgcctggcctctctttgcatttttcttttcttttcttcctttctttcctctccctctctctctctctctctctcccttctcttttttgagatcaagtctcactctgttgcccaggctggagtgcagtggcgtgatcttggctcattgcaacctccacctcccaggttcaagcgattattgtgcctcagcaacccaagtagctgggactataggcgtgagccaccacacctggctaatttttttttttgtatttttaatacagatgaggtttcaccatgttggccaggctggtctcgaactcctgacctcaggtgatctgcccatctcggcctcccaaagtgccgggattacaggcataagccacctagcccggcctgcatttttcaagactacaataaactgtcattaactatcgtcaccctgctatacaatagatgtcttgaattttttcctcccatctaactgtaattatgtatctttttaccacctctcctcatccatcttcctcaacacccttcccagcctctggtaaccaccatggtaacctgcagacaccttcatctccaacttccggcctgcagaacggagagatgatacatttctgttgttgaggcctccagtctatggtacttggttatatcagcctcagaaaactaatgcaacctccaaatccctcatcgctccctctgagtgtcttgtctactttttctccagtgtcctgtaagtcctcaaagcctgcaggggcacatagcaggggctcaatgtacaaatgcccattcactgactacatgatcctcccaggagaggtaggagaaacatgagccagttaaagaagagagactggggtcgggtgcgatggctcatgcctgtaatcccagcactttgggaagatgaagcaggaggattgcttgagtccaggagttcaggaccagcttgggcaacatagggagaccctttttctctacttttatttatttttattttttatttttttggagacgaagtcttgctcctgtcccccaggctggggtgcgatggcatgatctcggctcaatgcaacctccgcctcctgggttcaagcgattctcttgcctctgcttcctgagtagctgggattacaggcgcctgccaccacacccagctaatttttgtatttttagagacggggtttcaccatgttggccaggctggtctcgaactcctgacctcaggtgatccgcccacctcagccttccaaagtgctgggattacaggcatgagccaccgcgcccagcctcctttctctatttttataaaaattcttgggctgggcgcagtggctcatgcctgtaatcccagcattttgggaggctgaggtgggcagatcatgagatcaggagatcaagaccatcctggctaacatggtgaaaccccgtctctactaaaaaatacaaaaacaaattagccgggcatgacggcgggcgcctgtagtcccagctacttgggaggctgaggcaggagaatggcgtgaacccgggaggcagagcttgcagtgagccgagttcgagccactgcactccactctgtctcaaaaacaaccaccaccaccaaaaaaaaaaaaaaaaaaaattcttggccaggtgtggtggcttacgcctgtaatcccaacactttggcaggctgaggcaggcggatcacctgagatcaggagtttgaaaccagcctgaccaacatagtgaaaacccatctctactaaaaatacaaaattagctgggcgtggtggcacacgcctgtaatcccagctactagggaagctgaggcaggagaattgcttgaatcaggaaggcggaggttacagtgagccgagatggcaccattgcactcccgcctgggcaacaagagcaaaactccgtctcgaaaaaaaataaataaaataaataaaataaaataagaattattaaaaaaaaaaaagagagagagagaaagagagaagagattgggaactggccccacgtctcctgctacaggaccttgggaaaatcctgaaccctttgaacctcagtttgctcctccataaaacggggccatcagaccatcagccaatatctctaagctccccgtgggattgtgaatcctacatgtcccccaccccaggcttgcatgaaaaataaggtttctcttgggtgccacacagagaggatcccttctgtgtccctcaagccatctgtgaccgtcccacttcataaaagcaaaggtcacttgctcattgaaacttcctctgtgccaggcaagagctgcatcgccccaacaggcccctcaagcaagatgctattatcattatcatgatgccctttttgcagatggggaaaagtgaggctcagaaagaccaagtccgcaggccccatctctactgaaaatacaaaaacattagcgcccgtaatcccagctactccggaggctgaggcaggagaattgctgagatcgcgccattgcactccagcctgggcgacaagaccaaaactctgtctcaaaaaaaaaaagaaaaagaaagtaaagggggagaaggaaaggaagagggtggttgggaacacagaagaggtgacaattgggtagggactcaagctggaaagggggacaaagtggaagctgggtgcagtggctcatgcctgtaatcccagcactttgggaggccaaggcgggaggatcacttgtgcctgggagttctagaccaacctggccaacacagggagacctcgtctctgcaaaatatttaaaaacaattagctgagctaggtggcacacatctgtggtcccagctacttgggaggctgaattgggagaagcacttgagtttggaggtctaggctgctgtgagccgtgatcatgccaccatactccagcctgggcaacagagcaagatcctgtcaaaaaaaggaaggaaggagtggggttgacatgcaaggccatttgaggatgggctgggacattgtggactcatttccctcctccccagaggaccagaaggagcaagagatccccttacctgtgggcagcaggtatctcagcattagtaacaccagggcccaccgccggcctccaggggcaccctgccacaggccagccattcacggcttcaggaagacttgggggctgctctttgccctcgttccagccccccagccaagcccagagacatgtccagcagctccaggcggccaggtgcctaagatctggcgggtatcaaatgtgcccagtcagcctaatccctgcgaggctgggcggggctgggaaggatcccctcgcctattcccaggccctgattggctccctgggcccttggttctgcctgtctgggctcccaggaagacagggctccatgggcattgaggggagcgggagtttcagctgccaggctcagctgcgggtgtcaggaaaagtctccctagaatgttccccagacccagagctgcactgcgactttcatgggccacaatcacttttgcaatttacccattacttttttttttttttttgaaaggaagtcctattgtgttgcccaggctggaatgcagtggtgccatcttgtctcacagcaaactccgcctcccggttcaagcgattcttgtacctcagcctcccgagtagctaggactacaggcacacaccaccatgcccagctaatttttgtattttttagtagagacagggtttcaccatgttggtcaggctggtctcgaactccctatctcaagtgatccgccagccttggcctcacaaagtgctgagattacaggcgtgagccacagcgcccagcctatacttacattcctccctccccagctttattgaaggatgattggcaaataaaacattaaatatcttataatttgtaataatttttgagcaaagaggctcccattttcactttgcactggaccctgcaaatcacgcctctggtcctgctgcaagcggtagtctctgctattccacagcagcctcatgttctctctctgtgacgctctgaattgtatccccctcaaattcacaagttgaagcctttacttccgatgtgactgcattcagcaacagttttcaggctgggcgcagtggctcatgcctgtaatcccagcactttgggaggccgaggagggtggatcacctgaggtcgggagttcgagaccaacctgaccaacatggagaaaccccatctctactaaaaatacaaaaatcagctgggtgtggtggtgggcacctgtaatcccagctactcaggaggattcaagcgattcttctgcctcagcctcccaagtagctgggattacaggtgcacgccactacacctgggtaattttttttttttttagatggagtcttgctctgtcgccaggctggagtgcactggtgcgatagctcactgcaacctccacctcccaggctcaagtgatcctcccacctcagtctcccgagtagctgggttacaggtgtgcaccaccacatctggctaatttttgtatttttagtagagacagggtttcaccatgttgcccagtctggtctcgaactcctgagctcaagcaatcctcccgactctacttcccaatgtgctgggattataggcatgagccactgcacttggtcatctaagtcttattgcttatctccagcacctatcaacttagaatatgcttgctaaatgaataaatatgtgaattaaagaataagtgggctgggcatggtggctcacacttgtaatcccagcactttgggaggctgggtcaggtggatcatgaggtcaggagttcaagaccagcctgaccaacatggtgaaaccctgtctgtactaaaaatacaaaaaattagctgggcgtggtagtgggcacctgtaatcccagctacttgggaggctgtggcagagaattgcctgcatcagggaggtggaggttgcagtgagccgagatcgtgccactgcattccagcctgggagacagagtgagtccgtctcaaaaaaaaaaaaaaaatgaaaatagagttggctttgagtggagagaaatcaaggaggaccacccagaggaggtattcaaaaccttccagttaaaatttgcccaccagctttgccatataatgtggaatcagagagtgtgatgtctccagctttgttcattttgcttgagatggctttggctatttggggtctctatcaatggataaatggataaagaaaatgtgtgtatatatatacacacacacacacacacacacacacacacacacacacacgatgaatactatacagccttaaagaagaaggaaatactgtcatttttgaccacacggacgaacctgggggacattgtgcgaagtgaaataagccaggcacagtgagacaaatactgtgcgatttcgcttaactgtggtatctgaaaagatcaaattggtcgggcgaggtggctcacgcctgtaatcccagcacttcgcgaggccaaggcgggaggatcacttgaggtcgggagtttgagaccagcctggccaacatggcgaaaccccgtctctatgaaaattacaaaaaaaaaaaattagctgggtgtgttatcgtacctgtgatcccagttacttgggaggctgaggcatgagaattgcttgaactgggagacagaggttgcagtgagccatgatcacgccactgcactccagcctggtgagagagcaagactacatctcaaaaataaataagtaaaataaaaaggttaaactcatggaattagagagtagaatgatggttaccagggctggggaagtgggaagactgaagagagttagttggtcaaaggacacatgttttagttagcaggaataagttctagtgatctattgtaactataggtcaaaataatgtattacatatttcttttttttttttttgagacagagtctcgctctgtcacccaggctgaagtgcagtggcccgatcacagttcactgaaacctccgcctcgcaggttcaagcgattctcccgcctcagcctgctgagtagctgggattacaggtacacgccactacacccagctaatttttggatttttagtagagacgggggtttcaccatgttggtcaggctggtcttgaactcctgacctcaggtgatccacctgcctcggcctcccaaagtgctgggattacaggtatgagccaccatgcccggcccacatatttgaaaattgctaaaaagagtttattttacatagcgacgtcgctattaagaaaaaaaaaagtttattttaaatgctcttaccacacacacacacacacacacacacacacacacacacacacacgataagtaggtgagttgatggctatgttaattagcttcttaaataattccacaagatatacatacaaatatcaaaatatcagattgtaccccataaatagatacaattattatttgtcattaaactttttaaataaagaaaatttaaaaataaacaattgtccaccaggttcctctttctttttcttttcttttccattttttttttttttttttttttttgagacagggtctcactctgttcctcaggctggagtgcagtggtgcaatcatagctctctgcagcctcaaactcttgggcccaagcaatccacctgcctcagtctcctgagtaactgggactacaggcatgtaccaccgtgcccagctgatttatacttttttgttttgtagagactgggtctggatatgttgcccagggtttttgtttttttttatgtgggggtgggtgggtggggggtgaggaccgagccttgctctgacacccaggtttgagtatagtggtgtgatcttggctcactgcaacctccgcctcccgggttcaagtaattttcatgcctagcctcccaagtagctgggactacaggtgctcgccaccacacctggctaatttttttttttgtatttctaatagagacaaggtttcaccatgttggccaggctggtctcaaactcctgagttcaggtgatctgcctgccttagcctcccagagtattgggattacaggtgtgagttcggctccaggctggatcttgaattcctgggctcaagccatccttctgcctcagcctcccagaatgctgggattacaaagcttgagacagcaccttggccaccaggctcctcttttcttttttctttttttttttttttgagacggagtctcgctgtgtcacccaggctagagtgcagtggtgcgatctcggctcaccgcaacctctgtctcctgggttcaagcgattctcctgcctcagccacctgagtagctgggactatagccgcacaccaccaagcctggctaatttttgtattgttagtagagacggggtttcaccatgttgggcaggctggtcttgaactcctgacctcgtggtctgcccaccttggcctctcaaagtgctgggattacagatgtgaggcactgctcctggccaggttcctcttttcaaaggcagctcccgggggcacggctgacttgtgtctggtaactttttttttttttaaggaaaaccatctagttttttgggaaaaccagactcagagctcagaggatctgagcagagatttaggctcctgggtcctccagctccttgaacccacggggaatccagcagcggttgctcccttcccccctaaggaatgcaggaaccctgcccagaagtggcattagtaactgagctctccctttgtccctaagctgccattccattgtcttcccccagtgatcacggaaaaggtcctggagggtggaggagaggtgctcagaatggaggaggaggaggggtgttgggactgctcagctcctgctgaagtaaacacctgctctgtgttccataagctgggaccccagggtcaggccaaagggaaatggataccccgggtttgggtggtcgccacaaattctaatgcatgtactacctacatcatagccgcccccccaccaaataagcccagtgattaagcgtacagtttctggagcctggtgccagagtttgaaacctcctttttttttttttttggagacaaggtcttactctgtcgcccaggctggagtgcagtggcacgatctcggctcactgcaacctccacctcccaggttcaagcgattctcctgcctcagcctccctagtagctgggattacaggcaccccccactgtgcccacctaatttttgtatttttagtagagacggggttttaccatgttggccaggctggtcttgaacttctgacctcaggtgatccacccgcctcagcctcccaaagtgctaggattacaggcttcaaccaccacgcccggcctaattttttttttttttttttttgagacagtttcgctcttgtcacccaggttagactgcaatggcacagtctcggctcacctcaaactccacctcccagattcaagcgattctcctgcctcagcctccggagtagctgggattacaggcgtgcaccacgacgcccagataatttttgtatttttagtagagacggggtttcaccatgttggtcagactggtcttgaactcccgacctcaggtgaccagccctccttggcctcccaaagtgctgggattacaggcgtgagccaccacacccggccctctttaaagttctaaaatgcttctaacctttaagctgtccttgttcattcctgggcttaggccaaactaactttgggaaggaattcagctgatggtttgactctgaaacaaaactgataacagccctttccctaaaagacccacttcttgcctgggaaccagtctgcctttgcaggactaacaaattagctacaagattagaaattacagtttaggagtcatgcagcctctgggtccaagagtctgaacgtccccagattgctcccagaggtagcatcactattgtaaaacctaaaatcagtgcttgagatagtttgcagaccctgcactcgatggatcagctgacaccacccagaccatcagaccagaccagtcaagatcgcaccattgcactccagcctgggcaacaagagtgaaaccccatctcagaaaaaaaaaaaaaaaaaaaaaaaaaaaaaaagaaggaaaagaaagaaactctacacttcctgtccttattcctgggaatttatttaacaatttaatttctcaccatacccgagggaaggcacagcctattgcaaagtcattttgcacgaaagcaaactggggctcagagaaccaggcctccagtcagtgctggtgtcatggacaaccaggctgagggcccatggcagaacctgttttatgacatggctgctctccctgaagccagtgaggcacaaagcctaggggagtggacaagggacaggaaggtgtgggtttccatcctgctgtgtgaccttggggaagtcacctaacctctctgagcctcatttttctttcttttttcttatttatttattttgagacagagtctcgctctgtcgcccaggccagagtgcagtggcgcaatctcagctcactgcaagctccgtctcccaggttcaagtgattctcctgcctcagcctcccgagtagctgggattacaagcgcgtgccaccacgcctggctaatttttgtatttttaatacagatggggtttctccatattggtcaggatggtctcgaactcctgacctcgtgatttgcccacctcagcttcccaaagtgctgggattacaggcatgagccaccgtgcccagccttcttgtttttagtttttttttttttaatgaaaaaaaaagtattattatggccgggcacggtggctcacgcccgtaatcccagcactttgggaggccaaggtgggtggatcacctgaggttaggagttggagaccagcctgaccaacatggcaaaacctcatctctactataaatacaaaaattagctgggcatggtgtcgcatgtgtgtaatcccacctacttgggaggctgaggcaggagaatcgcttgaacccgggaggcagaggttgcagtgagctgagattgtgccactgcaccccagcctgggcaacagagagagactctgtctcaaaaacaaaacaaaacaaaacaaaaaccagaagagatgtgtggtgcatgtaaaatacacatgagatgagattttgaagactgattttgaaaaaaagaatgtaaaatgtcttggccataactttcatcagaattacttgatttgtatttaaatatcatggcatttagtttatgggggatttttttgttttaatttatcttttttctttttttccagcaaatgcttaacatccaaagtttatggttatatgtttgagatgggatctcattctgtcgcccaggctggggtgcagtggctcactgcagcctctacctcctgggttcaagccatcctcccacctcagcctcccaagtagctgggactatataggtatgtgccatcacgtttgactaatttttaaatttttttgtagaagccgggtgcagtggcaaatgcctgtaatcccagcactttgggaggccgaggcgggcggatcacctgaggtcaggagtttgagaccagcctggccgacatggtgaaactccgtctctaccaaaaatacaaaattagctgggggtggtggcgcgcgcctgtaatcccagctacttgggaggctgagacaggaaaatctcttgaacctgggagacagagattgcaatgagccaagattgtgccactgcactccagcctggacgacaaagtgagactctgtctaaaaaaaaaaaaaaaaaaaagttttctgtagacaccgaatctcactatatatgttccccaggatgaacttgaagtcctgggctcaagtgatcctcccatctcagcctcccaaagtgctgggattacaggtgtgagccaccgcgcccgacccatagatgcttgttaagggaaaatcccagcactttaggaggccaaggagggtggatcacctgaagtcaggagttcgagaccagcctggccaatatggtgaaaccccatctctacaaaaaatacaaaaattagctgggctttttggctggtgcttgcaatccttgagaggctgaggcaggagaatcacttgcctgtagtcttagctacttgggaggctgaggtgggaggatttgcttgaacccaggagttcaaggctgcagtcagctatgatagcgccactgtacttcaacctgggcaacagagggagacctggtcccttaaaaaaaaaaagacatttctcaagagggccttctaccttccttccttccctttgaaaaacctaggagggagttacagatgttattgttcaccagctgtatcctaaggaattcaggttcgtcctaaaggaaaatgccttttcccctttcctcacctcgttttagatactctctggaggattttcctcagattctcgctgaaacctgactctctcctggtaatgcaaatattcctgggctctctatgggaaagctgcggccctgtgcctgaccccagggcactgggagagaaagtctttccgggccgcaaggtgtcataggaaaggggtcccaatccaaaccccaagagagggctcttggatctcaggcaagtctgtaaagtgaaagcaagtttttaggaaagtaaaggaataaaagaatggctactccatagacagagcagccccaagggctgctggttgcccatttttatggttatttcttgataatatgctaaagaaggggaggattattcatgcctcacctttttagagcatctggggtaacttcctggtgtcgccatggcatctgtaaactgtcatggtgttactggtagaaggtgtccaggttcttggcatcccaaacaaagaattggacaaaacacaccaacaaagcaaaagcaaggaaggcagaagcagggattttttttttttttttttttttttgagacggagtcttcctctgtcatccaggctggagtgcaatggtgcaatcttggctcaccgcaacctccgcctcccgggttcaagtgattctcgtgcctcagccttccgagcagctgagattataggcatgcacccccatgcccggctaattttgtatttttttttagtagagtcggggtttctccatgttggttaggctggtctcgaactcccaacctcaggtgaactcccgacctcaggtgatccggctgcctcggcctcccaaagtgctgggattacaggtgtgagccaccgcgccccagccagaggcagggatttattgagaatgaaagcacactccacagtgtgggagtgggctggagcataggggctcaaagtccccattacagaatttttcggagtttaaataccctttacttggggtacgccctatgtaaatggagaggatgaagtaaggttacagtcattgacttggcttccgcccttcctgccataggtgaagtgtgaatcgaccttatattcttggcctccagaccttgttttcctgactcagtgacactgatgggagtgtagcagtgaggacaaccagaggtcactattggggccatcttggttttggtgggttttgactggcttctttttgcaacctgttttatcagcaaggtctttatgacctgcatcttgtgctgacctcctatctcatcctgtgacttagaatgccttaattgtctgggaacacagcccagcaggtcttggccttattttacccagcccctacacaagatggagtcactctggtttaaacatctctgacaaaggcattcagagagaaagtctgtccatgtgaacattgtctcctaagcttgccgggtgctccaatcacggccatgggcaggacgtgtgacagctggtctccccctccaagactcccagactagcaggcaaatctaacattccagaaacccttaaatagttcatgaatgacacctgaaatctgcattctgctgggggaggcagggacgtgtcttggccgtggctgggaagcaagatttttaaagctcaggcctgagctggaagaaaagactggaggaagaggggaggggatgggcaggattccaactctcctgggggagttccaggctggggcaacaccggttttactttctgaagcggagggaggtctctgtccatctcctgctgacacccaccccacctgggcctggctgctacccgagggtaattatctgcacccagccatgcaccgcaccgccgttcccactgcccatgactcactcggccccccttgcgttctttgttcttcgcctccttcccccacctccctgcaggcttcacactttgcaggcctaggtcttagtcatctctgggaacggctccaattttcttacaatgataagtaaatggatcattctttagctcggctagaatgtccccatctttattctcagagcaattccttgcacatagccgcatgccctcatcatagggattttgccctggctgccaccttgccctccttctggttccctgtttcattttcgaaggtctttcttctttgagacaaggtctcactctgcccctaggtgaagggcagtgatgcgatcatagtttactgtagcctccaactcctgggcccaatcgatcctccaaccttggcctcctgagtagctgggactgtaggcacccggctaatttttaaaaattattttcagagacagggtcttggccgggtgcggtggctcatgcctgtaatctctgtactttaggaggccgaggtgggtggatcacctgaggtccggagttccagaccagcctggccaaaatggtgaaaccccgtctatattaaaaatacaaaaaaattagccaggcgtagtggtgcacgcttgtagtctcagctactcaggagactgacgcaggagaatcacttgaacccaggaggtggaggttgcagtgagccgaaattatgccattgcactccagcctgggcgacaagaacaaaactccatctcaaaaacaaaacaaacaaacaaacaaaaaaactcaaaagagacaggttcttgctgtgttgcccaggctggtctcgaactcctgacctcaagtgatcctactgcattggcctcccaaaatgctgagatgacagtcgtgagccaccacacctggcctcgttttgaaggtcttgaatcaaataattaccttttccttgaggtatctggaatatatagataacataaccggttaggtcaggggtcgatctttaaccaggcccagggtgcggtgccgggctgtctgcctatggatttgatttctgccatttagtttttacttcttctttctttggaggcagaaattgggcataatatgaggggtggtgtcctcccttactatgattgtgcccctgcactccagcctggtcaacacagcaagaccctgtctcaaaaagaaaagggatctaacatctttttaaatttacttatttattctacctgtagactcttaacactagaatgtcagggatttttgcatgttggttcattcactgatccgttgtattctcagacctggggcttgtcaagcatgcaggcactgaatgaacatctgttaaggaaatgccgagtgagccaagcatggaatttgtaaggctcttgtgtcgtttcgaaccccgagagcaagccaacaaacaacatgagctggtgtggagcaacacgctgttttaatgtgcacctgggtgcagacggctgaggcctaaaatggcgtcagccccaagtgaggacggggcaggggttttatagtctcccgtaaacagcaagtgtcccagtctgacgtaactgctacatggtacccggatggcccgtctcttgatcttcaggggcatgtgtcttccggccagggtagatgtcttccagccagggtacgtgtcttccggccagggcaggtgtcttccggccaaggtagctgtcttccggccagggtagatgtcttccggccagggtagatgtcttccggccagggtaggtgtcttccggccagggtagatgtcttccggccagggtagatgtcttccggccagggtacgtgtcttccggccagggtacatgtcttccggccatctctcttcctgcttctgctatcttgctggcgcatgctgctggggcaagtagccttgcaccttgggactgggcctgagaagggaggagttattcatccccccaagtttatcctcccaagttttcaggccgcggggagaatctttcagaattattctgtcaatattgtttcttcccccttaccctggctctcttctcccaatcctgccctggtccccactctgcagatgagtagacactgtgtcccaccttgtcctgtgggtgcctgatacttgactctgtcagtgcttgtggctgctgtagttttatttattttcgagacagagtctcactctgtcacccaggttggagtgcagtggcgctatctcggctcaccgcaacctctgcctcccaggttcaagcgattcttctgcctcaacctcccgagtagctgggattatctaggcgtgcaccaccatgcccagctattgtatttttagtagagacagggtttcaccatgttggccaggctggtatcaaactcctgacctcaggtgatccccccacctcggcctaccaaagtgctgggattacaggtgcgagccactgtgcctggcttgtagtttaatttttatttatttatttatttatttatttatttatttttggagatgaagtcttgctctgtcacccagtctggagtgcagtggcacaatctcggctcactgcaacccccacctctcaggttcaagcgattcccctgcctcagcctcccaagtagctgggattacaggcgtgcaccatcatgcctggttaatttttgtatttttagtagagatggggtttcgccatgttggccaagctggtcttgaactcctggccttaagtgatctgcctgccttggcctcccaaactgctgggattacaggcgtgagccactgcaccaggccaattaacttctcctaatctgtaactaaggtctgagtcctgaagaccttcctctgagcctcagtaaatttacttaatctagatgggtccaggtgccagggatagttacccttatcttgtctcctgctaaattttagagtctagagagtttcttcagactcccaataaaacttgtttaatcctaaacaggtccattaagaattccttcattatcttgtcatgcttcaaggcccaggaaaggcctgggcaaaactcttggtgtgcttttgttacgttccagcctttgtctaagggcactggcgctatcatctttaaatatttaacttaaccacgcagtcagtgctgaaacagttgttagagaggcctgtgttagtgagacctggcctgtcacagtatctctctgtctctctttccctccctctctctttttcttgcataactgcagtatctctctgtctctgtctctctctgtagcgctccctctgtctctctctttcatttttcttttctttttatttatttatttatttattttttgagacggagttttgctcttgttgcccaggctggagtgcaatggtgtgatctcggctcactacaatctccacctcccgggttcaagcaattctcctgcctcagcctcccaaatagctggcattacagtcacacaccaccatacctggctaattttttttttttttttttttttttgagatggagtctcgctctgtcgcccaggctggagtgtagtggcgcaatctcggctcactgcaacctccacctcccaggttcaagtgattctcctgcctcagcctgccgagtagctgggattacaggcgtgcaccaccatgtccagctaatttttgtatttttagtagggacagggtttcaccatgttggtcaggctggtctcgaactcctgacctcttgaactgcccgcctcggcctcccaaagtgctgggattacaggtttgagccaccacgcctggactaatttttgtatttttagtagagacggggtttcgtcatgttggccaggctggtcttgaacgcctgacttcaggtgatccacctgcctcagactcccaaagtgctgggattacaggcgtgaaccaccaggtccggtcttctctctctctttttcttgcataacttcagtatctctctgtggacaacagaaaccagatggccccagtcctgggttaggtgggaagatattcaccgagcccaggggctggggtgggaaatttggaaaacgtaaggccactttcaaccctttcccagtgtgccttaacttgggaagcccctgggctataggcttctggctccccagtggcaaaaggcactgaggtcaggtggggaaagggaccaggattaagcaaaatgtctgtgctaggcgggagatgctgtctgtgaaaagtgcccgagggactggagcacctgagacgtcctcgctgcgtgtttcttctgccctcgtgtgtctccattgggaactgcagtaacccaagtctaggtttttgttgttttttgagatggagtctctctctgccgcccaggctggagtgcaatggtgtgatcttggctcattgcaacctccacctcctgggttcaagcgattcgcctgcctcaacctgccgagtagctgggattacaggtgcccgccaccacgcctggtgaatttctgtatttttagtagagatggagttttgccatgttggccaggctggtcccaaactgctgacctcaggtaatctgcccgcctcggcctcccaaagtgctgggattacagatgtgagccaccacacccggccttaagtttattattattattattattttagacagcatcttgctctgtcacccaggctggagtacagtggtgcaattatggctcattgtagcctggacctcccggcctctgctgatcctctttcctcagcctcccaggtagttgagactacaggtgtacaccaccaggcctggctactttttttttcttttttggtagagatgggatctcactatgttgcccaggctggtcttaacctcctgggctcaagcaatctacccacctctgctgggcatggtggctcatgcctgtagagccagcactttaggaaacctttatttcttaacacagagcaagttggagatgtttttgtttggctgacagaatcttaagagatttattggtgcctgaggcatttctcatttcacaggggagggaggggtctaaataaatgcttcagctcaagctggatacagagggagggattttcccaaatttctagcagcccccaggttgtaataacttcccaagtctctggcaattccagccttctgtcaattagcactgtaatcacctgcgtgcctatggcaagagagtttagggaacttgcaagaagagagagctgtagtttcgctttcccatggtttctggttactccaaaaaggccctgaccagaatcatggactctccatggcaaactctcatcttattttatatttatttgtttatttatttatttttttatttttgagatggagttttgttcttgttgcccaggctggagcgcgatggcatgatcttggctcatcacaacctccacctcccgggttcaagcagttttcctgcctcagcctcccgagtagctgggactataagcatgcaccaccatgccctgctaattttgtatttttagtagagacggggtttccccatgttggtcatggctggtctcgaactcccaacctcaggtgatccacctgcctcggcctcccaaactgctgggattacaggcgtgagccactgcacctggcctattttattttttatgtattttattttttgagatggagtctcgctctgttgcccaggctggagtgtagtgacgtgatcttggctcaccgcaacctctgcctcctaggttcaagcgattctcctgcctcagcctcccgagtagctgggactacaggtgtgcaccaccatgtctggctgatttttttgtatttttagtagagacgaggtttcaccatcttggccaggctgctcttgaactcctgacctcgtgatccagccgcctcagcctcccaaagtgctgggattacaggcatgagccattgcgcccaggcttactttatttttttagtttaattttttttttttgagacaagggtcttgctatgttgcccaggctggagcacagtgtttattcacaagcacaatcattgcacactacagccttgaacttggtctcaagcaatcctcccaacttccaattatcttaaattctgtttttgtctttgtttttgaaatggagtctctctctgtagcccaggctggagtgcagtggtgggatcttggctccctgcaacccccgcctcccgggttcaagtgattctcctgcctcagcctcccaagtaagtgggattataggtgcgcaccacctcgcctggcaaatttttgtatttttagtagagaccgggtttcaccaccttggccaggctggtctgaaactcctgatctcaggtgatccgcctgcctctgcctcccaaagtgctgggattacaggtgtgagccaccgtgccacctggccattctttttttttttttttttgccagagtcctgctctgtcacccaagctggagtgtggtggcaccatctcagctcactgcaatcttcgactcccgggttcaagtgattctcttgcctcagcctccgaagtaactgggattacagatgcccaccaccacacccagttaatttttgtattttagtagagatgcggttttaccatgttggccagtctggtctctaactcccgatctcaaatgatccacctgccttggcctcccaaagttctgggattgcaggcatgagccaccatccccggtcaaattctgtgtttcattcaccagaatagtcaccagaaagcagattttcttcgtctttccaacctgtgtacttacttatagaaatctacagcagggccacatctggaggtctgtttgttcacctgagaaattaaaatttaattctcttggaagaaaagtaacacaaataaatcagaggtttgattattcaaagccattctgcttaatatcatgtcagcttgaggccgggcactgtggctcatggctgcttttgcttttgctttgttggtgtgttttgtccaattctttgtttgggaatccaagaacctgaacaccttctaccagtaacaccatgacagtttacagatgccatggcgacatcaggaagttaccccagatgctctaaaaaggtgaggcatgaataatcctccccttgtttagcatatcatcaagaaataaccatgaaaatgggcaaccagcagccctcggggcttctctgtctatggagtagtcattcttttattcctttgctttcctaaaaacttgttttcactttgtggacttgcctgagatccaagagccctctcttgggatttggattggacccctttcctgtaacaccttggggtcaggaaaggctttctctcccagtgccttggggtcaggcacagggccacagcttccccatagagagcccaggaatgtttgcattatcagggataagagatggccttgcttccggtttgaaggctcaccagcatcttggggatggtgttggtggccagacagaaatcaatcagggacaggttggccaggaagaagtacatgggggtgtggaagtgggagtctatgctgatggccaggatgatgagcaggttccccaggactgtaccaggtacatgcagaggaacagagaaaagagaagtgtttcctgctccggcttttctgacagtcccaggaggatgaattgagatgcactggtttggtttcctggttccatgggtgtgattcctctggaagtatggaaaggggaggttataggaatgccagggagatggttttggaaggttagatgaactctaacctttaattttaacctttaactttagagaccctgtctctaaaatataaatattatatatgctataatatatatattatttttcagagacaagatcttgctctgtcacccaggatggagtgcagtggtgcaatcatagctcattgcaaccttgaactcctggactcaagccatcctcctgccacagcctctctagtagcagggtctacagtcacacatcaccatgcctggcctatttatcttcttttttgggggtggagagagggttttgctatcttgtccaggctggccttgaactcctgggctcaagcgatcctcccatctaggacttccgaagctctgcgattgcaggtgtgagccaccacacttggcctgacaacagcttatatataggttgcaccttgaaccatggatgaaatgtttacagcaactcatcttcttctttttttattaattaaaaaattttaggttggacgtggtggctcacggctgtaatcccagcactttgggaggccaaggcgggcggatcatttgaggtcaggagtttgagaccagcctggccaacatggcaaaaccctgtctctactgaaaatacaaaaattagctgggcgtggtggcaggcgcctgtaatttcagctacttgggaggcagagacaggaggattacttgaacccaggaggcagaggttgcactgagctgagatcatgccattgcactccagcctgggcaacaagagtgaaactccatctcaaaaaaataaaaaagtaatataaccattaatattgatgctactgtcaactgttgactctccaaacaaacccagcaagtgcttgtaagccaaaaataaccacccccatccatctgaagggacccctcctcttggccaaaggcattctaaagttaacctgaaaagctgcttcaggactgtgtgtggtggctcatgcctgtaaacccagcactatggtagatgggcgaatcactagaggccaggagttcaagaccagactctccaacatagtgaaatcctgtctctactaaaaatacaaaaacattagctgcgcgtggtggcatacacaggtaatcctagctacctaggaggctgaggcacgtgaattgcttgaacccaggaggcagaggttgcagtgagccaagatcgtgccattgcactccagcctgggcgacaagagtgaaactccgtctcaaagaaaaaaaaatgttaaaagaagtaatttatagagaagaatataatagaggtcagaaactcagatctacgtaaataaaggaaaagcattaaagaagtaataggtaaaagagaaacaagagcttttggctgggtgtggtggctgacacctgtaattccagcacttcagaatttttatcatgaaaggtttttatttcatgagtgtttattgagtgagcacattaccccataatctgggcattgcctcataaaaccaaatttctaaaaatttaggaggctgaggcagaagaatcccttggggccaagagtttgagaccagcctaggaaacctagcgagaccccatctctataaaacattaaaaattttttaaaaattagccaggattgatggcacacacctgtagtcccagttactcaggaggctgaagagggaggattatgtaagcccaggaattggaggctgcagtgggttatgaccagaccactgcactctaccctgggtgacagaatgacaccctgttcaaaaataagaaaggaaaacagaaaaacctatagattaaaaggacttaaaacagtaatcaaccaactgcaatctatggacattatatgaattctgatgtaaaaaactaaaaatatatgaggcaatttgggtaatttgaataataattgggtatttgaaaatgttatataattattattaatattttgaatcaaaataattgctaggcgcagtggctcacatcggtaatcccagcactttgggaggctgaggtgggtggatcgcttgaggtcaggagtccaagactagcctggccaacatggtgaaatcctgtctctactaaaaatacaacttgggagcctccctactcaggaggctgaggcaggagaatcgcttgaacccgggaggcggaggttgcggtgagccaagattgcaccactctactccagcctggatcacagagcgagactccatctcaaaataataataataataatggtattgtggttatgctttcaaaaagagctttttgttttttgaagacataccaaaatcattatacatatggaatttgctctgaaattatctctgggaagagagaggtcaaagtaggtaggacacagattcaacagaggcttgacttggtaggtgtggaagctgagtgattgggcacacaggatttcattatatgaagctgaggcataccaaaaaaaaaaatgccagttttgttgatcaaaaatggtagaatattgacaattgcatatggctcaacctagtattttgctctttacatagctaaaggctttgaaaaactgagccttcatgtatccatcagtttcatgagtgtttactgagtagacacaacccaataatctgggcatgaccttataaaaccaaattcctgaaaattcccagtaatgccaccatggtcccaatactcagtgagaatctggctgcagacttagtcagccaaccactctctccatgtacatccattagggtaggctctagtttctccttttgcagaactgaatgaaagccatgatccctttatagagagttgttctgttgaggttgagtgatgaaagcaggcagccctgggtcttggtgacagatcactgggtggacgtgggaaaatgtttggagtgtttcttagttcttttctttttttttttttttttttttttgagatggagtttcgctcttgttgcccaggctggagtacaatggtgcaatctcggctcaccacaacctctgcctcctgggttcaagcgattcttctgcctcagcctcctgagtagctgggactacaggtgtgcaccaccatgccaactaatttttgtatttttagtagagacagtgtttcaccatgttggccaggattgtctcaatctcttgacctcatgatccacccgcctcagcctcccaaagtgctgggattacaggcgtgagccatcacacccggccatttcttaattctttaagtgatgaggaacattggcttccaataagaatggaaccttctgatataagaagccctgggcattggaaagactgagtttagaagacagggagagtttgttcctggaagagagggtgcagagaaagttaggaatcatgcaacttacccctaagttgcctcatgaagacataaaatgcttcttactgccacgtcccagcccccataggaaacagaactattcagggactagagatgaaattggacaatttgtgtaacaaggagcttggggaattgacttcttattggcccagaaattgtaaatattccctcggttcctacaacttatcccccaccctagcttttcttctttggaccaggaggacaacttcccagtatttctatgtagcatctgctggcccaaacatctaacttcatcatctagtacctgctgggaggacactgagccagtttaactcatgcctgggtgatggtgtcaagaagaggaaagatagcccagtgagtgagctgagagagagagagagagagagagactgaacgaatgttggtaaaattaatgaagccaagctcaatgatctcagatacactggaagattcttttttattatttattgatttactgatttatttattttagagacagaaccttgctctgttattcaggctggagtgcagtggcacaatcacagctcactgcagcttctacctcctgggcttaagcaatcctcctgcctcagcctctagagtagctggaactacaggcatgtgccaccacacccagctgattttttgaacatttttcccccaccgagatggagttttgctcttgttgcccaggctggagtgcaatggcacgatcttggctcactgcaacctctgactcccaggttcgagcaattctcctacctcagcctcccgagtagctgggattacaggcatacaccaccatgccttgtgaattttgtatttttagtagagacaaggtttcaccatgttggtcaggctgatctcgaacacctgacctcaggtgatcacccgcctcagcctccgaaagtactggaattcactgtgctcggccgacactggaagattctgtctggtcaatcagcacccacttgtcagcccagaatccaatggctcttcttaccaaactagctcagcctggtttagttgtgatgctaccagtcctttacctaaaaaccatgattatttgtagcactgtttttcttcgtaactagactttttttttgaaatggagtcttactctgtcacccaggctgcagtgcagtggcatgatcttggctcactgcaacctccatctctcaggttcaagagattctcctgcctcagcctcccaagtagctggaattacagatgcccgccaccacacccagctaatttttgtatttttagtggagctggggtttcaccataatggccacgctggtctccaactcttgacctcaggtgatccacccgcctcagcctcccaaagttctggtattacaagcatgagccactgcgcccagcctggactttcttttccaagcccacttgagtgcctgaaggaacagatggcttcctcctcagtacttctgtaggcagaagtttgtgttattccccatgttgggtcttggaagcccttggagattcccaagtattccaggctgagagatcttagacacagagtgcagaggtccagataggataggactggtgcttccttggagagaggctcatcaagaagcttaagggatgaatcttcgggttcctgatacttaaatttttcccaagagctgtggaagaatgaggagtgacagagtaattcagtgaaagcttaggtgtcagggcaggaggatgtctgagatcagttccttgattccattagtagtttaatcacagagcattcactggcttccttgagatggaaaaatactctgactcggccaggcacggtggctcacacctgtaatcccagcactttggaaggccgaggcgggcggatcacctgtggtcaggagttcaagaccagcctggccagcatggtgaaaccccatctctagtaaacatacaaaaaaattagccaggtgtggtggtgggtgcctgtaatcccagctactcgggaggctgaggccagagaaccatttatatccgggaggcagaggttgcagtgagctgagattgcaccattgcactcctgcctgagcaacaagagcgaaactctgtctcaaaaaaaaaaaaaatactctgactccttttaaaatgttttaattgtatatatttatgaggtacatagtaatgtttccatatatgtaatgtatagtgatcagatctgggtaattagcacatctattatcacaaacatttatcatttctctgtgttgggaacactcaatatcctccttctagctgtttagctatatagcatattattgttaactgtattcatcctacagggatatagaacactagaacttattcttccaatttgcctgtagttctgtatgctgtaacaaatctcttcctatctgccccctccctctacccttcccagactctagtatcctctgttctttttacttctatgaaatcattttttttcttttagctttcacatgtgagtgagaacatgcagtgtttaactttctgttcctggcttatttcatttataatatgctccaattctttccatgttgctgtaaatgacaagatctccttcatttttatggctgaatagttttccattgtgtatttctaccacatttttttttttttttttttgagacagagtttcgctcttgtcaccccggctggagtgcaatggcacaatctcagctcactgcaacctccgcctcctgggttcaagcgattctcctgcctcagcctcccaagtagccaggattacaggggcccaccactacgcccggataattttttgtatttttagtagagacggggtttcaccatgtcggccaggctggtctcgaactcctgacctcaggcaatccgcctgtctcagcctcccaaagtgctgggattacaggtgtgagccactgtgccctgcctaaagccaacacattttccaaaaatccctggctgcctcaacagttttcggagtgctcttacaatcctcaggggtgctgtgtgtggggtgtgattctctattaatccaagctcctcataatctgataaatgctgcctggagttcatctccctcactaaactgtgaattcatgaatccatgcgtgcttcatgaattacagagattaagagtacatgctctagatttagaatgcttgggctaatccagccacctgctctcagttaaaccccatttgattgtattaatcttctgtgcttccatttcttcctgcatgaaatagcactaacattattctgttgtcgtgagtagcaaattagcagagaccttcgatcagtgcctggcaatacaggataaccatcactgattcatgcgtatatggaacaattatgtttatgtcttctgtatcccagacaagatgctggtcacaaaaatgaacaaagacaaacaattcctgatttcaaatgtcttgaggacagggtctgtgtattttcatatatttgtccccacaactcaggccagatcctgtcactatatattgcaattaccaataattttttacaaaatgaatgaacgaatgcgtgagtgaataaaagtgacatctgcaaggtgttcattagaaatcacaaaaataaaaaataaaaatataaaagtaacatgatcagaactgtaatgcaggaagattaatttagtgacttcaggattgtttcttttttttgagatggagtttcgctcttgctgcccaggcaggagtgcagtggcgcaatcggggctcactgcaacctctgcctcagcctcctgagtagctgggtttacaggcatgcgccaccatgcccggctaattttgtatttttagtagagacgggttttctccatgttggtcaggctagacttgaactcccgacctcaggtgatccgcctgcctcggcctcccaaagtgctaggatgacaggcatgagccaccgcgcccggccgacttcaggattgtttcaaaggaagataattggatgcatgaggctagcttaagattagtgaacttggcaactcagaagtaataagagcctttcatttagggtgtctggaaagaggagatgactggaaatgactataaaaataaaaagttcaggacgggcgcggtggctcatgcctgtaatcccagcactttgagaggccaaggcgggcagatcacgaggtcaggagatcaagaccatcctggctaacatggtgaaaccccgtctctactaaaaagtacaaaaaattagccaggcgtggtggtgggcgcctgtagtcccagctactcgggagtctgaggcaggagaatggcgtgaacctgggaggcggagcttgcagtgagccgagatcgtgccaccgcactccagcccgagtgacagagcgagactctgtctcaaaaaaaacaaatagataaaataaaaaatggaaagttcaggctgggagcaatggtttacacccataatcccggcactttgggaggccaagtgtgggcggatcacctgatgtcaggcgttcgagaccagcctggccaacaaggttaaaccccatttctttttttttttttaaatagtatttgcaccacaggtgctattgtttattttaattccaattaatcaagaattgccacacatgctaagaataaagctgttggatgtgaactaaggagcacgttgctattttattttagtgtccagatactcagctgggttaaaccccatttctactaaaaatacaaaagtgagctgggcatggtggcgtgctcctgtaatcccagctacttgggagggtgaggcaggagaattgcttgagcctgggaagcagagattacagtgagccaagatcgtgccactgcactccagcctaggcaacagagcaagaccccgtctcaaaaggaaaaaaaaaaacaaaggaaggaagttcgacttgtagaggatgtaacactcattgatggattgcctttgacggtggaggtagaaaggaggaagactgaaaatttcaaacacaggtatctggaaggatggtgattccattcatggacatagtggctccgggagaaaatagactttatttttttatatgttgagtttgccatgtcaggaagaaagaaaagagggaaagaatgctttgtataaccctattattattgttgttgttattgagatgtagtcttgctctgtcaccaggctggagtaccgtggtgtgatcttggctcactgcaacctctgctccaagggtcaagcaatcttcccacctcagcctcccgagtacttggaactataggtgtccaccatcatgcctggctttttttttttttttttttttttttttggtagagaaggggttttgccatgttgctcaggctgctcttgaacacctgcattcaagctctctgcccacctcgccctcccaaagtgctgtgattacagatgggacccatcgtgcctggccctaacattttttaattaatcaaaaaagaagaagagttgctataaatacttcatccatggtttaaagtgcaacctatatataagctgttgtcaggccaagtgcggtagctcacacctgcaattgtagcactttggaaggcctagatgggaggatcactcaagctcaggaattcaagaccagcctggacaacatagcaagatcctgtctccaccacacacaagaaaagataaataagccaggcttacttatggtgtgtgcctgtagaccccgctactagagaggctgtggcaggaggctggcttgagcccaggagttcaaggttgcaatgaactatgattgcaccactgcactccctcctgggtgacacagcaagaccctgtctctaaaaaataatatctttagcctggcgtggtggctcacgcctgtaatcccagcactttgggaggccgaggtgggcggatcacgaggtcaggagttcgagaccagcctggccaatatggtgaaaccccatttctactaaaagtacaaaaaattagccggacgtggtggtgggcacctgtagtcccagctactcatgaggctgaggcaggagaatcacttgaacccaggaggcagaggttgcagtgagcagagattgcacgactgtactccaacctgggtgacaaagcaagactctgtctcaaaaatatatatatatgtatatatacataatatgtaataatatatataatatttctattttagagacagggtctctaaagttacaacaccgtacatgtgtggaatatatttacatatattctctctctctctctctctatatatatatatatacacacacacatatatattctatatatacacacacacacacacacacacacacacacatatatatatatacacatctggtctcataattagcccaaatgagaactgggatgtgatcgcatctaactttccaaaaccatctccctgtcattcctataacctcccctttccatacttccagaggaatcacacccatggaaccaagaaaccaaaccagtgcatctcaattcatcctcctgggactctcagaaaagccagagcaggagacgcttctcttttccctgttcttctgcatgtacctggtcatggtcgtggggaacctgctcatcatcctggccatcagcatagactcccacctccacacccccatgtacttcttcctggccaacctgtccctggttgatttctgtctggccaccaacaccatccctaagatgctggtgagccttcaaaccgggagcaaggccatctcttatccctgctgcctgatccagatgtacttcttccatttctttggcatcgtggacagcgtcataatcgccatgatggcttatgaccggttcgtggccatctgccacccattgcactacgccaagatcatgagcctacgcctctgtcgcctgctggtcggcgccctctgggcgttttcctgcttcatctcactcactcacatcctcctgatggcccgtctcgttttctgcggcagccatgaggtgcctcactacttctgcgacctcactcccatcctccgactttcgtgcacggacacctctgtgaataggatcttcatcctcattgtggcagggatggtgatagccacgccctttgtctgcatcctggcctcctatgctcgcatccttgtggccatcatgaaggtcccctctgcaggcggcaggaagaaagccttctccacctgcagctcccacctgtctgtggttgctctcttctatgggaccaccattggcgtctatctgtgtccctcctcggtcctcaccactgtgaaggagaaagcttctgcggtgatgtacacagcagtcacccccatgctgaatcccttcatctacagcttgaggaacagagacctgaaaggggctctcaggaagctggtcaacagaaagatcacctcatcttcctgaccaccaggactcaggaacttctggggggtagaatatatacatctgggagtcttgggctaacatctggaattgcatgagttgaagagtaggcactttgaattttattattattattattatttagagatggggtctcactatgttgcccgtgctggagtgcagtggcgtgatcatagatcactgcagcttcaaacttctctctctgtgtgcattgttttactagagacagggtctcactaatttggccaggctggtctggaactcctgggctcaagcagtacttccccctcagcctcctaacatcctaggattacaggtgtgagctaccacgccgagcctcactttgaattttttgtttgtttttgttttttgagacagagtctcgttctgttgcccaggctggagtgcagtggcatgatcacggctcattgcagccttgacctccctggctgaagcaatcctcccacctcagccttccgagtagctaggaccataggcacataccaccatgctcagctaatttttgtatcttttgtacagacagggttttgccatactacccagccgcagaagtttcacgggaagtctcaggatggtctggtaactgtttttctttttgttttcttttttgtttttgagacagagtctcattctgtcacccaggctggagtgcaatggcatgatctctgctcactgcaacctccgcctctgggttcaagtgatcctcctgcctcaccctccagactagctggaactacaggcacccatcaccatacccggctaatttttgtatttttggtggagacagggttttaccatgtgggccaggctgttctcgacctcctgacctcaaatgatccacccaccttggcctcccaaagtgctgggattacaggcgtgagccaccaagcctggctggaaaggccatttgaggacacagcgaaagggggtctatctgccacggaagaaagacttcaccaaaaaccaatcccaacggcacgtcgatcttgggcttctgaccctcagaaccatgagacaatccacttcacttatttagccacgcagtctgcggtgttttgttataaccagccctggccgaataacacagtgactgtgaggggaggagtcttaggaagatgtcaacacgtgaaggagtgaaatgccgccatgtggttctgtggctggaccgactctgtctccaaactccgttaggaaagataatcattctggggctctgttgcccaggctggagtgcagcggcatgattatagctcactgcagtcttgacctcctgggctcaagcagtcctcccacctcagcctcccaagtagttgggaccagaggcatgcagcaccatgcccggctaatttatttttatttgtatatatttttttggtagagatggggtctcactatgttgtccaggctgctctcaaactcctgagctcaagccatcctcccatctcagcctctcaaaatgctgggattacaggtgtgagccaccacacctggccaaaattttttttttttttttttgagacagagtctcactctgttgcccaggctggagtgtagtggcactatctcagctcactgcaacctccacctcctgggttcatgcaattctccgcctcagcctccccagtagctgggactacaggagcgcaccaccacacccagctagtttttttgtatttttagtagagacgggatttcaccatgttggccaggctggtcttgaactcctgacctcaggtgatccacctgccttggcctcccaaaatgttgggattacagacatcagccaccacgcctggcccaatcattgtttttaccccttgtctttatatgagtcactaataaagcagaagtgtcccgggtgctgtggcttacacctgtaatcccagcactttgggaggccaaggcaggcagatcacctgaggtcaggagttcaagaccagcctggccaacatggcaaaaccccatctctactaaaaatataaaaattagtcaggtgtggtggggcgtgcctgtaatcccagctactcgggaggctgaggcaggagaatcacttgaacctgggaggcggaggttgcagtgggccgagatggcaccactgcaacctgcacttcagcctaagggatggagcgagactgtctcaaaataaataaataaataaataaataagttgaagtgtctcaagttgatataatgtggatgtttctctcctccagatcttatgttgaaatgtgatccccagtgtcggaggtgaggcctaggcagaggtgtttgattatgggggcagattcatcatgaagaatttagtgccctccccatagtaatgaggaagttcttgctctactacttcacaaagaccctggcactcctcccctctctctcttcctctctcaccatttgacttgccagctccccttgcccttccaccgtgattggaagcttcctgaggtctgcaccagaagtagatgatggcaccacccttcttgtacagtctgcagaactgtgagacaaataaacctcttttctttataaattacccagactctaggctgggctcagtggctcacgcctataatcccagcactttgggaggctgaggcaggcagatcacctgaggtcaggagctcaaaagcagtctggccaacatggtgaaaccctgtctctaccaaaaatacaaaaattagctgggcgtggtggcgcactcctgtaatcccagcttctggagaggctgaggcaggagaatcacttgaacccagggggcagaggttgcagtgagctgagactgcaccactgcactcctgcctgggcgacaagagcgacactctgtctcaaaataaataaataaataaataacccagactcaggtattccttgtagcaacacaaacactgatatagaagtcttcctaaatacgtaaataaatatgataatgctaacttaaaaaaatttttttttgagaaggagtttcactgtgtcacccaggctggagtgcaatggcgccatcttggctcattgcaacctccacctccccggttcaagtgattctcctgcctcagcctcccgagtagctgggattacaggtgtgtgccaccacgcccagctacttttttgtatttttagtacagacagcatttcaccatgttgcccaggctggtctcgcactcctgacctcaggtgatccacccgcctcggcctcccaaagtgctgggattgcaggtgtgagccactgcgcctggccgataatgctaactttataggggagcaaatagagcttggaacagtgaaataaagtgtcaacaattatacggttatttacaaagcacaggtgggattcaaagccagttggtctgattccaaattctcacccttaaccatgatgatcttctcttgtatttgaagaccttaatcaggttttccggatcattcattatgaatttctcttttgtatatttcacagcttaaagtccgaagtagctggcatgttagtggaatgatgacactctagaaatgggtttctgagaggtgagatccacagggagaaaaggccggtgcagtggctcatgcctgtaatcctggcactttggaagctgaggcgagtggactgcacgagctcaggagtttgagactaccctgtgcaacatagtgaaaccccctctctacaaaaaatacaaaaattagccagatgtggtggtgtgaacctgtagtctcagctactccagaggctgaggtgagaggatgcgtcacctgagcctggggtggttgaggctgcagtgagccatgatcacaccactgcactctagcctgggcaacagagtgagatcctgctaaaaaaaaacaaaacaaaaaaacaacaacaaaaaaaaaacacacacacacataaattgcctagtaggaaactctcatccttgtttattttatttatttatttatttatttattttgagacaaagtcttgctctgtcgccaggctggagtgcagtggcaagatctcagctcactgcaacctccgcttcccaggttcaagcgattctcctgcctcagcctccggagtagctgggactacaggtatgtgccaccatgcccggctaatttttgtatttttaatagagacagggtttcaccatgttggccaggctggtcttgagctcctgacctcaggtgatccgcctgcctcagcctcccaaagtgctgggatttcaggcatgagccacagcgcccggcctcatcttccttctgtactggattcaacacctctttctctacatacctttaaaggtgtcctcactttagcaaacaatatcagaaagattaatactacatttcagcttaaaaataaaattaattcataaggatgtgtgtatttttaaaaattttacattcctgcataagaatatgtggtattactttctcttgcattcaaattgtctctttcattctgagaatgccaccagatgatgaaaagcatgacaacttttttttttttagatggagtcttgctgtgttgcccaggctggagtgcagtggtatgatcttagctcattgcaaacctccgtctcccgggttcaaacgattcttctgcctcagcctcccagcctgggtgagagtaagacccttctcaaaaaaaaataaaaaaggaaacaacaatcagggcacaaaattcgttcatgaagtttcaacttttacaatgtcaaaaagaataaaatttgattaataaattgtctagggctataaacaacatgcatattaaaaggacagatttgtagggcaaaaatgtacaagactgtcaatcaaatactaattaataaaaaaatcactaatcaaatacagcatcaataaaattcctgtctccatggttacattacttcttccttttctttgtgtttcctccacttctgtctttttttttcttttttttttttttttgtttgagactgaatctcactctgttgcccaggctggagtgcaatggtgcaatcatagctcactgcagtctccaactcctgggctcaagcgatcctcccatttcagcctctcaagtaattgggactacaggtacacaccactgtgccaagctaatttttaaaattttttgtaacagggtctgattttgttgcccagctgggttcaaactcctggcctcaagcaattctcttgcctcagcctcccaacgtgttggaattacaaggatgaaccactgcgcctggcctccacctctgcctatcttataagaaaacatgtggttacatttagagcctgcccaggtaatccagggtaagctgcttctctgcaaagacccttttcccaaataagtcacattcacccttttgtcatatgatttaaggccaggtgcggtggctcacgtctgtaatcccagcattttgggaggctgaggcaattgtatcacttgagtccagaagttcaagaccagcctggccaacatggcaaaaacccatctctactaaaaatataaaaattagcaggctgtggtggcaggcacctgtaatcccagctactcaggaggcagaggaaggaggatctcttgaacccgggaagcggaggttgcagtgagccgagatcacgccactgcactccagcctgggcgacagggcaagactccagctcagatagatagataaataaataaataaataaataaataaataaataaataaaagctcagattcacaagcgagaggattaaaatgtggatatagtcttctgagggccatgagccaactcatgacagaaatgtcttctggttgactccatgaaagttatctattatcaatggacccagggaagggttctccattttctgtctctgggaatcaggtctagatatgtctcttgcattgactgcaactacctgttgcagtcagaggaaaaccagtgctggggggagggaacctcgtgaaggactgaatgaagccctctcctattcgtgcacattccttaattctgaggtccttgtaatgaaagagaactgtctttactgtttgagcatattagagttaggggtgctatttatttatttatttatttatttattttttgagtcttgctctgtctcccaggctggagtgcagtggtgcaatctcggctcactgcaacctccgcctcgcgggctcaagcaattctcctgcctcagcctcccgagtagctgggattacaggctccagctaccacacatggctaacttttgtatttttagtagagatggggtttcaccacgtgggccaggccagttttgaactcctgacctcaagtgatccacccaccttggcctcccaaagtgctgggattacaggtgtgagccactgtgcccagcccagggctcctattctttaaactggaacctaaggtatcctcacttatgaagttcaaatatctcacaataatctcaaatcactaagataatctaatcatgctaattttttgatgataaaactgagtataatagatgctaatgttgtctagggagaatatagtttaccagtgactggtcccagtagttactaaattgggtatgaaaacttagctcccttgacccactgtaggtctacactggggtgcaattgacaagaccctaaatacgcaataaggtggaagcttgtctccagatataacaacaacctcgcttaaatccttttcctggcagcgcacagtgacttcaccactaatctcagatctttgggaggccatggcaggaggatcacttgaacctaggttttgagaccaacctgggcaacatagccagagtccatctctacaccacaccccacactggacgtggtggtgcatgcctggagtcctagcttcctaggaggctgaggtaggagggtccctggagtttgagccctggagtcctggagtttggggctgcagggagctatgatcatgtcattgcattccagcctaggtgacaaagcaagaccctgtctatggaaaaaaagaaacaaaaaacaaaactgcccagctacttgggagcctgaggtaggagaatcgcttgaacccagaaggcggaggttgcagttagccgagattgcgccattgcactccagcctggtggacagagcaagactccgtctcagcaaaacaaaaaacaaaaaacctaaactaaacaaaaaaccaaaaatacattttcctgacctatcctcctgaactatctaccttccacaacttttcttcttctgagactaatccattaaaaaaaaatcacttagccaggagcggtggctcacgcctctaatcccagtaatcccagaactttgggaggccgaggcgaatggatcacaaggtcaggagatcgagaccaccctggccagcatgatgaaacctcacctctactaaaagtacaaaaattagccgggtgtggtgtcgtgcacctgtagtcccagctactcagtaggctgaggcgggagaatcgcttgaacctgggaggcagagattacagtgagccgagatcacaccactgcactccagcctggccgacagagcgagactctgtctctaaataaataaataaataacttgggctcagcctctgagtctatggcctgagcaaagaaattgagtctagagaattaaaatcacatgtccatcatcacagatccagacataaaaagcaaagtcagatttcaagccggagtggaaatgtagttggcttttatgtcatctagacattttagaagaacttggtgatgaaagagtcaggcaggctgggcgcattgtctcacgcctgtaatcccagcactttgggaggccgaggcgggtggatcacctgacgtcaggagtttgagaccagcctggccaacatggtgaaactctatctctactaaaaatacaaaaattagccaggcatggtggcaggcgcctgtaatccccactactcaggaggctgaggcaggaggatggcttgaacccggaggcggaagttgcagtgagccgaggtcgtgccattgcactccagcctgggagacagagaaagactccatctcagagaaaaaaacaaaacaaaacaaagagtcaggcattctagctcaccaggaatcctgtcactttgacttactctagaaacctgaatccaaagcaaatggcacaccacagaagagaaggtatcctccctatgaacttcctcaaggttcctttcatgtccttattcctcagactatagataaaggggttcaccatttgagggaacacagaatacatcactgaagccactgcagtcttcctaggtgagtcagtaaccacagaactaatgtacacccccaaacctgccccatagaacaagagaacaatggagaggtgagacccacaggtggaaactgctttgtgctttccacttgctgatggcattctcaaaacacaggaggtgatctgagtgtaagacaaaatgattccagacagaggaacaccaccaaatatgcaagctgcaaaatatatcaggatgttattgatgagggtgtctgaacaggtgagttggatgacctgagccagttcacagaagaagagcgggatttccaggtctgtgcagaaggacagcctcaacaccatcaggctgagaagaagggcattcacaacactagtcaacagagagagaagaatcagcaggccacagaggcgggggttcatgatgactgtgtatctaagggggtgacaaatggccacatagcggtcataggccattgctgcaaggagacaattttccaagccagcaaaaaacaagacaaagcagatctgggtgaggcagcctgagtacgtgatgctccgattctgagcttggatgttcaccagcatctttgggatcgtggttgtgcttaaacaaatgtccaaaaaggagagattggagaggaagaagtacatgggggtgtggaggtgagagtcagagatgacagccaagaggatgagcaggttccccaggatggtgaccaagtacatggacaggaacaggctgaaaaggacgggctgcagttccggatcctctatcagtcccaggagaaggaattttgaaatagctgtttggtttctcgcttccatgctgttgatgatgaatctgatggaaaagataataaaatctgtaagcagcagctgcatcggcatcactcgagaacatgacagaaacgcaaaatcttgctcccctccccagacttcttgctgataaactctggggatgagaaccgacagtttattctttcacaagccttgtagatgtttttgatagatgctgaattttgagaaacagttcaaaacatttacttaggaatggagttttcttaatcaaaaaatgtggaaatctttttttttttttttttttttttgagacagggtctcactctgtccaccaggctggaatgcagtggtgtaatcttagcttattgcaagctccacctccatgttcaagtgattctctggcctcagcctcccaagtagctgtggttacaggtgcacaccaccattcctggctaattttgtgtgtgtgtgtgtgtgtttttagtagagacggcgggggtgggggtctcaccatgttggtcaggctgatctcgaactcctgacctcaagtgatccacctgcctcagcctcccaaagtgctgggattacaggcttgagccaccatgcctggcccaggagtggagttttcttaatcaaaaaatgtggaaatgttttttttttttttttttcgggagatagggtctcactctgtcgcccaggctggagtgcagtggtgtgatcttagctcactgcaagctccacctcccaggttcaagtgagtctccttcctcagcctctcaagtagctagggttacaggtgcacagcaccatatttggctaattaaaaaaaaattttttttttcgtatgtttagtagagacagggtctcaccatgtaggtcaggctggtctcgaactcctgacttcaagtgatccgcctgcctcaggctcccgaagtcctgggattacaggtgtgagccatcacgctcggccaaagaatgtggaaatcttttatctttattctttctgctgttcccttacccatggcagacacttctagtctagtctagtgctctttcctgctaagaccacatgtacctttgggattcttatcagcatagagctccaaacagcgctagagatagacagaaagtcagagttagcatgctaaatattacctatttgtcatctttcacatgtgattttctaagacaatcatccaattttcaatgttacccaaaacaaatgaatatagaaacatactgcaacattgctaacattttgtcagtttgtgtcattcttaaacttttaaaaatgataaaacttgacatttaaaaaattttaaaattcttggtggggcgtggtggctcatgcttgtaatcccagcactttgggaggccgaggcgggcagatcacggggtcaggcaatcgagaccatcctggctaacacggtgaaaccccatgtctactaaaaatacaaaaaattatcggggcgtggtggtgggcgcctgtggtcccagctactcgggaggctgaggcaggagaatggcgtgaacccaggaggcagagcttgcagtgagccgagatcgcgccactgcactccagcctgggcaacagagcgagactccatctcaaaaaacaaacaaacaaatttttaaattctctagtgtgcactgtgaacccaagtgaatattcaaatccttccccttgcttactttcttcctacatttcttttctctctcctcctgttccctccattttcttttctttttttctttttctttttctttttttcgagatggagtcttgctctgtcacccaggttagaatacagtggcgcgatctcggctccctgcaacctccgcctcccgggttcaagctattttcctgcctcgtcctccaaagtagctgggattacaggcgccagccaccgcacccggctaatttttgtatttttagtagagacgggtttcactatcttagccagactggtctggaactcctgaccttgtgatccacctgcctcggcctcccaaagtgctgggattacaggtgtgagccactgcgcctggcctctccattttctttattgaaacaaattattataagacactaactcaatttcatttcttcttctacgtgctgagaataaaacaaggtataaaacatgattatccacatcaaaaaacttatccaccactatcaaatagactttaatccctctgatgcaagattggttcaacatacagaaatcaataaatgtgattcatcacataaaaagaactaaacccaaaaaccacattattatctcaatagatgcaaaaaaggcttttaataaaattcaacattgctttatgttaaaaaccctcaacaggctgtgcgtggtggttcacgcctgtaatcccagcactttgggaggctaaggcaggcggatcatgaggtcaggagttcgagaccagcctagccaacatggtgaaaccccatgtctattaaaattacaaatattagccaggcatggtggcatgcacctgcaatcccagctacttgggaggctgaggcaggagaatctcttgaacccaggaaatggaggttgcagtgtgccaagattgtgccattgcactccagcctgggtgacagagtgacactctgtcttaaaaaaaaaaaaagtttagcttgttttttaacaactgatgtatgattcacaaaaaaaagagagaagggaagagaaagagagagaaaaagaaaaggagaaagaaaggaagaaaggaagaaaatttttgtatgataaacagtgtacagtgtgagaaaaattctaaacgtttttgaacctgcacagatatattcatttttattatagattattcatgtgtgaattattcagaaagtacggagaataatgaagggctggctacccatcagtcaacgatataagattcacacaaggccaggcgtggtggctcaagcctataatcccagcactttgggaggctgaggcaggtggatcacctgagatcaagagtttgagatcagcctggccaatatggcgaaaccccgtctttactacaaatacaaaaaaattagctgggtgtggtggtgtggtgcacgcctgtaaccccagctacttgggaggctgaggcaggagaatcgcttgcacctgagaggcagaggttgcagtaagccgagatcgtgccactgcactccagcctgggtgacagagggagactgtgtctcaaaaaaaaaaaaaaaaattcacacaattcaccatccttgattagatatttttattgcaaaaagtaaaaaatatttttattgcaataaagtgtgtatttgaggctgggcatggtggctcatgcctgtaatcccagcattttgggaggctgaggcaggtggatcatctgaggtcaggagttcaagaccagctgaccaatatggtgaaactccgtctctacaggagaatcgcttgaacctgggaggcggaggttgcagtgagccgagatcatgccactgcactccagcctgggtgacagagcaagattccatctcaaaaaaaaaaaaaaaaaagtgcatatttcaaaaccaccgcttcatgtttttgattttttttcccttccctaggggaaccagtacacacacttgatctatattattcttctatacctttcattatatttgatattattcttccaaataataacaatggcattgtgttgcattttaaaagctttatatagccaggcactgtggctcacatctataatccgggtcctttgggaggctgaggcgggagtacaagaggccaggagtgtaagaccagcctgggcaacgtagtgagaacctgtgtctacaaaaaaaatttaaaaatttgcaaagtgtaatggcatgcacctgtagtcccagttactcagtaggctgaggctgaaggattggttgatccaggaattcaagactgcagtgagctatgatcgagtcaccacactccttccaggcaacagagtgagaccttgtctctaaaaaaaccccaaaaaacaaaaccacctgccctcatttccaaagcattaattaactaaaggactttgggttaactgattggcttcaacaaaaatgatgctcaacaactcacatggatattgcagaggatgatctatcctcaggaagtgcagacagactcgagtcctggtcaaaaatatcatgtctggaaggaggttctgatgcagcttccgagctgggtaagagatgttcagtgaggtgcttacagcctgacttgttgcactgtctatatccctgggacctcaatatccaacgctcctcattacactggctattttaccatcgttctgatcccaggagtgcacatccttaaagaccaagactagaggagtgaggaattcgggatggctgagtccctgtcccctgaggccacgtgtacaccatccatatctctccattgtttctgctcacctccacttcacgaatcttgctcccagaacacataccattcgtctagtaaaaaaaaggattttgatctgaagaatgtgagttctcttcattgtcagacccggaaagacattaaaatgagacagaaaccacacccctcctcccctcctttgaactatgcattcatctcataaaactgcttgctgttgccacaagtagctataaattaacctaataatagcatatgaattaaaaagaaattatttaggcagttagtgagggtacagaagtcctgggtaaggtttttctttttaataaaaagcagcccccaaatcatttcttttcaggcaaaaagtagcctgaaaaatcaagctgcaagcataggtaagcaagctgaaagcctgcgtaggtgaatgccagcagctgtgccagaagacaggtataaccaacatgaaggttttcttttttcttctttctttctttcttattcttttttttttttttttttttttttttttgagacagtctcactctatcacccaggccggaatgcagtggcgccatctcagctcactgcaacctctgcctctgggttcaagtgattcttgtgcctcagcctccagagtagctgggattacaggcgagtgccaccacacctggctaatttttgtatttttagtagagatgagatttgatgctgggcgtggtggcttatgcatgtaatcccagcactttgggaggctgaggtgggtggataacctgaggtcaggagtttgagaccagcctggccaatatggtgaaaccttgtctgtactaaaaatacaaaaattagccaggcgtggtgacaggcacctgtagtcccagctactcgggaggctgaggcaggagaatcgcttgaacccaggaggtggaggttgcagtgagctgagatcgtgtccctacactccagcctgggtgacagagcaagactccatctcaaaaaaaaaaacaaaaacaaaaacaaaaaacccttaacctgtaagccatctgcaagtttgggtcttacatgtaaactagctgggcacagtggctcacgcctgtaatcccagcactttgggaggctgaggcaggcggatcacgaggtcaagagttcaagaccacaatgaccaacatggtgaaactccgtctctactaaaaatacaaaaattagccagccgaggtggcgcacacctgtaatcccagctattcaggaggctgagacaggagaatcgcttgaacccagaaggcagaggttgcagtgagctcagattgtgccactacactccagcctgggcgacagagcaagactccatcttaaaaaaaaaaaatgtgtaagctgccccaattttccttgcttcgttacctgtcttttaaggttcttcaatctctgaccacacaggtagtatctggcaagcaacagtattcaacctgagatttcaagatgttatgtccattatgccagtaataataatctgtgttcccccagttgatctgtcaatctaaaataatcaaaagggtcagaatctagtttgttttattatttttagagacaggatctggctctgttgccccggctggagtgcagtggtgcaatcatagctcactgcagcctcaacttcttgagcccaagcgatcctcccacttcagcctcccatgtagctgggactacagatgtgcaccaacacgtctgagtaattttttattttttttttcagagagatgggggtctctctatgttgcccaagctggctttgaactcctgggctcaagcgattttcccacctcggcctctcaaagtgctggtattacaagagccaccacacccagccagaatctagtctaaagacagtttattcaagcacgatgtctgagacaagtcaccagggaagcacagcttccaaagaagggaagtgagtgtttcaaggtgcaaaagtttgagattgtttatgtaggcaaaattcagggaagtttaacagaatttcttttttctattttttttttttttttttttgagacacagtcttgctctgttgcccagggctggagtgcagtggtgtgatctcagctcactgcagcctccgccttccaggttcaagtgattctcgtgcctcagcctcctgagtagctgggattacaggcacctgccaccacgtccggctaatttttgtatttttagtagagatggggttttgccatgttggtcaggctggtctcaaactcctgacctcaagtgatccacctgcctctgcctcctaaagccctgggattacaggtgtgaactactgcatgaagcccagtttaacagaatttcaacatctttaaggcttaatgcatagttacaatatttggtattattcttctaaacagtaacaattgcattgtgttgcattttaatgcaactgattagtctgggtggttttttcttttagggaaggtgtatttaacattttacaatgatgacataacagtcgtggggtcctgtgtaccatctggtctgagttaggtacaggacagtaaaggaggcagttaatctataacaaaggtcagtgactggaagcagggagatctggtctctggtctctcccagtgctttatagaacaagaaccacaaagaagagccattatggaaaacagtatagaggttcctcagaaaactaaaaatggaattacgatgtgatccactaatcccaccatggagaatgtctccaaatgactgaaactaggattcacgacagaaaaatcaactggacacagaacaaggcagtaatcgaggaaacagaaaactgaaacgtataaaacacatagaacacagcaatggcagaattaagtctctcctaatcagcaatcatgttaaaaaataaaaggattggccgggtgcggttgctcacacctgcaatcccagcactttgggagattgaagtgggtgaatcataaggtcaggagatcgagaccaatctggctaacatgatgaaaccccgtctctactaaaaatacaaaaattagccaggcgtggtggcatgcacctgtaatcccagctactcgggaagctgaggcaggagaattgcttgaaccctggaggccgaggttgcagtgagctgagatcacaccactgcactccagcctgggtgatagaatgagactaaaaaaaaaaaaaaaaagataaaggattaaactatccaaacaaaaggcagtatttgtcagcataaatactaaaaattgattcaactatatttagaagagacttgttttagactcgagacaaaacagggtaacagtaagagtatggatagacagatgtatttcatgcaaatagtatgcagatgacagctgcggaggctgcactaatatcagaagacagaataaagtcaaaaccattaaatcagtcaaaggaggacatatatatacatatactcttcctgcttttttgtggttatgaaataagcgatgtcactaccttgctaacttttcttttctcctgtcttatttcacactcaatatcttcttctctaactaaagtacttctccatggtagaactgtccttgtaaagaaacattcgaaaggttttcatgacagccccaaggcagcagtgagtcctctaacacggcaatgatagaattacttttattcaatgatgattctttttctttctttctttctttctttctttctttctttctttctttcttcctttctttccttctttctttccttctttctttcttcctttctttctttccttttctttctttctctctctctttctttctttcttgtctttttttttttttaatttattttttgagacggagtctcgctctgttgccaggttggagtgcagtggcactatcttggctcaccacaacctcagcttcccgagcagctgggaccacaaggtgcccgctaccatgcccagctaatttttaaatttttagtagagatggggtttcaccatgttggccaggctgatctcgatctcctgacctcaggtgatccccctgccttggcctctcaaagtgctgggattacaggcgtgagtcaccgtgcccagccaagtaagatttttcttttggtctccaaaggagatgggttagaatcatagcaagggaagatgactgagggggaaagcgagaacttagataacattcttacaaataaatcaatgggactgttctaaaccaagtaagatgtcaaaaaaagatgatcaacctttgtccttcctacctaataattatttattttattctacaattcaggtttaataagtggatgataaatgcaacaaggggaacaattctaatttctaaaacaagagggaaaaatatgtgagaacaatagcattataggatttatgattatagactggttatggaacacaatgattccacattattatactgaatacttaggaggtgctgggcattgaattaagtgtttgtagtgcttatcagagtggagttcccagccgggtgtggtggctcacgcctgtaatcccagcactttgggaagcagaggtgggcagatcacctgtggccaggagttcgagaccagcttggccaacttggggaaaccccatctctactaaaaaaaaaaaaaagaacaaaaattagctgggcatggtggcgcatgcctgtaatcccagctactcaggaggctgaagcaggagaatctcttgaaccagggaggcggaagttgcagtgagcctagattgcacctttgcactcctgcccaggtgacaggctccatctcaaaaacaaacaaaaaaacaaacaaccaaaaaaaccaccaaaaaacaccagagtggacttcccaataggaattatactttatatggtcagtctaaggctctcatactaatcatttccccctcaccaggaattagattaagaaaaaatatatgatctatctctctgtggtgagattaaaggtgatatcttttggattactctatgcaatcccatttatcaatagatctgggaagaagagtcagatttctgtctctgggcatcatgtctgggtattacgtctgtatttgctacagccatctgggtccatgaggggaaccagccctaaaagaaagccacagccgggcacggtggctcacgcctgtaatcccagcactttaggaggctgaggtgggcaaatcacttgaggtccggagttcaagagcaccctggccaacacggtgaaaccccatctctactgaaaatgcaaaacttagccaggtgtggtggtgtgcacctgtaatcccagctacttgggaggctgaggcaggagaatcacttgaacccaggaggcagaggttgcagtgagctgagattgtgccactgcacttcagcctgggtgacagagccaggctgtctaaaaaaaaaagaaagccaaaagaagaaggagtaagtgaattattctctacattccctacctctgatatatttgcaaagaaatgtagctctctttattatttgagtatattataatcaacatttctttcactaaagccgacttcttcactgatcaagatagaatatctcaccactaggccgggcacagtggctcacacctgtaatcctagcacttttgggaggctgaggtgggcggatccaaaggtcaggagtttgagactagcctcgctaatacggcaaaaccccatctctactaaaaatacaaagattagccaggtgtggtggcagctgtctgtagtcccagctactgaggaggctgaggcaggagaatagcttgaatctgggaggtggagtttgcagtgagctaagattgcaccgctgcactccagcctgggtgacaagagcgagactctgtctctcaaaaaaaaaaaaaaaaaaagaaagaaagaaagaaagaaaatctcaccactgaaataatctaatgatagcaattttattgatgataaaactgagggtagtaagtagacgttgatgttgacctgcacagacagtttagcagtgaccgggctctaaaattacagaattctggtatcaacaatcagctcccattttgcacaataggtttcactctggcatgcatttcatatggccctaaatattcaatcaggcagtatcaattctgtgttgcgaacacagccttctttggattcttgccctgacctgtgagacgcctcctgcttttcttcctctgagaatatttaccaaccaaatcactgtaacacttgccacaggttaactttttaaacaccgcatgcaaagaaactgagctttgagaatagaattcatttttgacacatgacagagctccaaaagaggcaagatttcaacaacaacaacaaaaaacacacacacacatccatgatgcagactagtcactttaagaaaatcttgaaaggtcgggcgcggtgactcacgcctgtaatcccagcactttgggaggccaaggtgggcagatcactaggtcaggagattgagaccatcctggccaacacggtgaaaccccatctctactaaaaaaatacaaaaaattagcctggcatggtggcgggcgcctgtagtcccagctactcaggaggctgaggcaggggaatggcgtgaacccaggaggcggaggttgcagtgagcggagatcgtgccactgcactccagcctgggtgacagagcgagactctgtcacaaaaaaaaaaaaaaagaaagaaagaaaaagaaaatcttcatgatgcaagagtcaggcactctggcttaccaaggaatcctgtcatgttgattccttttagaagcttcagttcaaagcagagcacaaagatcacaaaaaagaaagtaggtcaggcatagtggctcatgcctgtaatcccagcactttgggaggccgaggtgggtggattacctgaagtcaggagttcgagaccaccctggccaacctggtgaaaccccatctctactaaaaatacaaaaaaaatccaggtgtggtggtgtgtgcctgtaatcccagctactcgggaggccgaggcaggagaattgcatgaacccgggaggcggagtttgcagtgagccgagatcgtgccactgtactccagcctgggcgacagagcgagattctgcctcgaaaaaaaaaaaaaaaagtaaatctcgatgcaagagtcaggcactctggcttaccaaggaatcctgttatgatgatttattttagaagctccaattcaaagcagaggacaaagatcgctaaaaaggaaacagcctaccaataagtttcctcaaagctttcttcatctccttatttctcaggctgtagatgaaggggttcatcatttgagggaccacagtgtacatcactgaagccacagcagtaattcgggaagactcagcaacagcagaactaatgtacaccccaaaagctgtcccatagaacaaggaaaaaacagagaggtgacagccacaggtggaaaacgctttatactttcctcttgctgatggcattctcagaacagaggtgactatttgagaataagagaaaattattccagagagaggaattgcaccaaatacactacttgcaaaatatatgaggatgttgttgatgagggtgtcagaacaggcgagcttgatgacctgaacgacttcacagaagaacaaagggatttcaacgtttttgcagaaggacagctgcaataccatcagactctgaaccagggcatccatagtgctcatgaacatggagagaagaatcagcaagccccagaaatggacattcatgaggactgtgtacctcagtgggtggcaaatggccacatagcggtcgtaggccatgactgcaagaaagcaactttccaagccagcaaaaaccaagacaagacagatctgggtgaggcagcctgtgtaagtgatactctgattctgagcttggatgttcactaggatctttgggactgtggttgtggttaaacagatgtcagtaaaggagagattaaagagaaggaagtacatgggggtgtggaggtgggagtcagagatgacagccaggagaatgagcaggttccccaggatggtgaccaggtacatggacaggaacaggctgaaagggattaacttcagttctgggtcctctgtcactttcatgagaagaaattctgaaacagctgtttggtttctgggtcccatgtttttgatgatcaaaaaatgggataattagacaatcaaatgtgttttctagactgcgggagcaacgtcaacagaggcaaacaccatcttgaaaaggggtagattctaagggaagaaaataaataagtgttgccttttgtattgatattactttactgcttttacaaaacttgaagctaatacagcacagcatcaataattgttaattctggaaatggttaaggggtcatcattttttatttttatttatttattttttaaatttatttatttatttttgagacagagtcttgctctgtggccaggctggagtgcagtggcttgatcctggctcactgcaacctctgcctcctggtttcaagcaattctcctgcctgagcctcccaagtagctgggattaaagatgcttgccacaacacctggctaatttttgtatttttagtagagacggggttttgccatgttggccaggctgctctcaaatgcctggcctcaagtgatctgcccaacttggcttcccaaaatgctgggtttacaggcgtgagccaccacgcccagcctcatctttttttttttgagatggagtttcgctcttgttgcccaggctggagtgcagtggcacaaacttggttcactgcaacctccgcctcccaggttcaagcgattctccttcctcagcctcctgagtagctgggattacaggcatgtgccaccactctgctgttctgattattaaaaatatttggtaatgaaaaaacaaaaaataaataaaataaaacaaagtacataccaggaaaacggctggaagactctgtctggacccccagagacttcacgccagccaacagaaataatacaaagctgtgtcaagaaccaggaaaggagaatcgcttgaacccagggggcggaggttgcagtgagctgagatcatgccattatactccagcctgggcaacggagcaaaactccattaaaaaaaaaaaaaacaccacaggaaagtgaagataaggtgaagtttagcaagctgctcacctcctctcccccacaagactgcaagtaaattacagagaattttataacagtcatcctgttttcaaagaaaatggtaactacagaattcaggatagtgtatttgttgctggaagaaaacaaggtgatttgagtagaaaatcctacaggtaggttctatggtgatgacattaacttatttttaatgccagataggtatatgcggttttatcatgttactattctctcagaattacagatagatttttttttttttcctgagacagtgtctcgttctgtcgcccaggttggagtgcagtggcacgatctcggctcacagcaagctccgcctcccaggttcacgccattctcctgcctcagcctcctgagtagctgggactacagacgcccgccaccacggccggctaattttttgtatttttagtagagacgggtatcactgcgttagccaggatggtctccatatcctgaccttgtgatctgcccacctccgcctcccaaagtgctgggattacaggcgtgagccactgtgctctacactacctacagatagatagattttatgcattactttgtatatgataatgtaacaagtatgattaaagaaagacccttcatattctaaccctaaatatgttttctcatgttctcctaatattaaagttaggagtgtcaggcttcagaggttatcagcatctctccaagtgcttattaaaaattctcatacctcacacatttctcagagatttaacaccagtagttctcgggcaaggccaagaaccttctctatgaggaaaggtctcgggtggttcctctctgtgtctgttctgtggacaccaacagaggaatctcagtcctaggagactctatgagtgctagaataggagctgcgttccagatatgtaagagctttttgttttgttttgggggttttttagagacaggatcttgccatgttgcccaggctggtctcaaactcctggcctcaagcaatcctcacgcttcagcctcccaagtagctgggactacagccacgagccaccatgcctggcttcccagatattttggtgaaaataaagccagctcctcaagctccaaagacagctgcaacagaagactctccacccactcctttgattctcttttgacacctccattgtttgctcctcacacttagagagataattctgactgatgatcctgcgtgtgtgtgtgtgtgtgtgtgtgtgtgtgcttatagaaaaaaattatgccccaaaatcttgccaacttccattttctcctgtcttgtcttacactcgacatctccttctcaaatgaaagtatttctctacagagtaatcttcctagtgaagacacagtaaacagttttgcacgggagcactgagactacagctaatcctaaaattatacaattagaatatatttgtgtaatatacatataattatacatatagaggattatatatatatgtatatctccaggtgtggtggcactcactcatttgtagttccagctactcagggtcgctgaggcccaggagttcaaggctgcagtgagccatgatcgtggcactgcactccagcctgagtgacagagtgagaccctgtctctaataaacaagtaaataaaaataaaatttaaaaagaaaatttctattacaaatagactctcttcacagcagacctacagaaagaccgtcggttttctctgagcaccatgtctgaatatgatgcctacatttctgcagacatctgtttgcaagaggaaaatcagcacagacatggagccatcttcccgaggcttgcatgaatccccacactactgctcccatgcatttcttacccctgaagttcttgtcataaaaaataactctgtttcttattcatgtaaattatagtcagagtttctttctcttataagaaataaaagcttctggctgggcacagtggctcatgaatgcggtggtcactggtacattgtagtctctgcctccctagcggctcaattgccaaagctcctcattagccaaggaatttgtgttggcactgtaatcccagggtgcttaaatccttgcagaacaagggagaaattcaggatggctgctgtcctgaccctagaggccaagtgtacatcatccacttttctttttttctttctttttttttttttttgagatggagtcttgctctttcacccagcctggagtgcagtggcgcaatctcggctcactgcaacctctgcctcctgggttcaagcgattctcctgcctcagcctcccaagtagctgggattacaggcgcctgccaccactcccagctaatttttgtatttttagtagagatgggatttcaccatgtttgttaggctggtctggaactcctgacctcaggggatccacccacctctgcctcccaaagtgttgggattataggcatgagccaccatgcccagtctattttatttttttaatttttattttaattcaggggcacatatgcaagtttgtacataggcaaacttgtgtcatgggagtttgttgtaccaattatttcattacccaggtattgagcctggtacccattagttatttttcctgatccctgcctcctccagcccttcacccttcaataggccacagtgtatgtttttcccctctatgtgtccatatgttctcatcatttagctcccacttataagtgagaacacgtggtctttggttttctgttcctacactagtttgctaaggataatggcatccagctccatccattttcctgcaaagaacatgatctcattcttttttatggctgcatagtattctatggtgtgtatgtaccacattttctttatccattctatcagtgatgggcatttagattgattccatgtctttgctattgtgaatagtgctgcaatgaacataatgtgtgcttgtgtctttatagtacaatgattcatattcctttgggtacatacccagtaatgggattgctgggtctaatggtattctgtctttaggtctctgaggaattcccacactgccttccacaatggttgaactaatttacactcccactgacagtgtataagtgttcctttttctccacagccttgccagcatctgttattttttggctttttagtaatagccattctgattgatgtgagatgatatctcactgtggttttgatttgcatttccctaatgatcagtgatattgagcttttttttatatgattgttggccgcctatatgtcttcttttgaaaaatgtctgttcatgttctttgctcactttttaaatggtttttttttcttgtaaattggtttaagttccttaaagatgctggatattagaccttcatcagatggatagattgcaaaaattttctcccattctgtaggttgtttgttcactgtgatgatagtttctttcgctgtttagaagctctctagtttaattagatcccatttgccaatttttgcttttgttgcagttgcttttggtgtcttcatcatgaaatctttgctcgtgcctatgttctaaatggtattacctaggttgtcttctggggtatttatagttttgggttttacatttaagtctttaatctgtcttaagttaatttttgtatataatttaaggaaggggtacagtttcaatcttctgcatatggctagccagttatcccagcaccattgattgagtagggaatccttttcccattgcttgtttttgtcaggtttgtcaaagatcagatagttgaaggtgtgcggtcttatttctgggttctctattccgttccattggtctatttgtctgttcttgtacaagaaccatgctgttttgattactgtagccctgtagtgtagtttggagtcagatagtgtgatgcctccagctttgttccttttgcatagggttatcttggctattcaggatttttaaaaaacagttatttctagaaatcattttaaaagagagtaaaatctttttctggaggtgtgtaagctacttcagttgcttcttggatgtgagcctttggttgtagctattttttgataaattttctctgtttttttcttggttgttactggcactactattacatgaatatttatgattatgtcacactaaaatatgtctttgaaccagaaattaataaaagttttctcatcttattgctttatcacattgaaagtcacaaaaattagttttatttctatttctggttctccagcctgggcaacacagcaagattgtgtctctaaaaccaaaataaagaaaaaattgaaatgttcagagactcagaaagggaaaagtcatgaggcaagtgttcagataccaccttggggaaagtttgctgactctgtggaaagtgagcaggaaatgaagtagcgttaagggtagaatgtgttgtcccagggttgataagaaatgtggtggtggtcggcctggtgactcaggcctgtaatcccagcacgttgggaggccgaggcgggagaatctcttgatcccaggagttcgagatcaccctggccaacatggcgaaaccccgtctctactaaaaatagaaaaaaattagctgggcgtggtgatgcttgcctgtaatccttgttactccggagactgaagcatgagaattgcttgaacctaggaggcggaggctacagtgagccgagactgcaccactgcactccagcctgggtgacagaacagactctgtctcaaaaaaaaaaaaaaaagaaagaaagaaaaagaaaaagaaaaagagaaaaactgagcttggagaatggaactaatttttttttattatttatttttaatttttatttatttatttatttattttgagacggagtctcgctctgtcgcccaggctggagtgcagtgcggcatctcaggtcactgcaagctccgcctcctgggttcacgccattcacccgcttcagcctcccaagtagctgggactacgggtgcccgccaccacgcccggctaattttttgtattcttattcgagacggggtttcaccgtgttagccaggatggtctcgatctcctgacctcgtgatcctcccgcctcggcctcccaaagtgctgggattacagacgtgagccaccgcgcccggccgtggaactcgttttcgtacaatcacagagctacacacaaagaacaagtgatgtttcaaccccaagttaaaatgtacttacccactatgttatctaatcattttagaaaactcagtgatagatcagtcaggcattctggctcaccagtatttctgtgtctttgacccactttgaatcccaagtccaaagtggacaacataatcaggaagagaagttatcctaccaatgagtttccccgaggctctcttcatatctctgttcctcaggctgtagataaaggggttcataataggtgtgaccactgtgtacatcactgaagccaccgcagccctccttgaagagtcagaaacggcagagctaatgtacaccccccaacccgccctgtagaatcgggaaacaaatgggaggtgagactcacagctgaaaaaagctttattacttgctgacggcattctcaaaacagacaaggctatttgagaataagaaaacatgaccccagagagaagaatatcaccaaatatgcaagttgcaaaatagaccagaaagttatttttatttatttatttttattgtttttttttttttttttttgagtcggagtctccctctgtcacccaagctggagtgcagtggcatgatctcggctcactgcaacctccgcctcccaggttcaagtgattctcctgcctcagcctcctgagtagctgggactacaagcaagcgtcaccacacccggataatttttgtatttttagtagagacagtgtttcaccatgttgggcaggctggtcttgaactcctaacctcgtgatccacccgcctcggcctcccaaagtgctgggattacaggcatcagccaccgtgcctgactgcagtagccattattttattctgattttatgagatcagctcttttggattctacacatggttgagatcatgcagtatttgtctttctgtacctggcttatttcacttagcataatgttctccaggttcctccatgttgtggcgaatgacagaatttccttctttttaaagggtgcatagtactctatcatataccacattttctttttcttttccagacaaagtctcactctgttgcccaggctagagtgcagtggtgcgatctcggctcactgcaacctccgcctcctgggttcaagtgattctcctgcctcagcctcctgagtagctgggattacaggcatacgtcatcatgcctggctaatttttgtatttttagtggagacacggtttcaccatgttggccaggctagtcttgaactcctgacctcaagtaatctacctacctcaggctcccaaagtgctgggattacaggcgtgagccaccgtgcctgccataccacattttctttatccacttatatgttgatggacattcaggttgattacatttcctggctattgtgactaatactgcaatgaacatgagagtgcagatatctcttcagcatattgatttcaattcctttgaaattcaacagcacaaacataaatcaatataactatagatagtcaacctaaataacagaaagaggctatctaaaagaaaatgatgtttattgccaaagaaagcattgcaatagcgatacgcgtgccatcataaactatgtatgcattcaaggaggtaaaggaagacaaagttttttaatggaaaaatgaggaaggttacataattgttttgaaataattatccttcacagtaataactaataacaagggtgatgccagtctgaagctggacaggcagttgctgggcagatgtacttgcagaaatattttttgtgtaaggttgcaacagccttttgtgcaaggttgtggtttttgtcgtctcgtgatagtttttgtcgtctcgtgatagtttttgtagtcttgtgatagtttttgttattaggcatgcaagtgaaataaatctcttcatggccttccctagctttacttgtcaggatgtttttgtttttttcatttttgtttgtttgtttgtttttcatgagatggagtcttgctctgtcgcccaggctggaatgcagtggtgcgatcttggctcactgcaacctccgcctcccaggttcaagcgattctcatgcctcagcctcctgagtagctgggattacagatatgcgccacaacgtctggctaatttttgtatttttcatagagatggggtttcaccatgttggccaggctggtctcgaactcctgaccttgtgatccgcccacttcagcctatcaaagtgcagacttttttgatagccgctacacccagccttttttttttttaataagtgactccattttgattctgacaattttaacaatatatataccaagtacagtcagccttccatatctgccagtaccacattcatggactcaaccaactgtggatcaaaaatattaaaaatattaaagaaaattttaaaaatattaaataagaatattacaaaaatacaatattaagtaatacaactatttacataggattaacattatgctaggtaatataagtaatctagaaatgatttaaagtataggcgacctgggcacagtggctcacactgcttaatcccagcactttggaaggctgaggcagaaggattgtttgaggccaggagtttgaggctgcagtgagttataatcacaccactgtagttcaacctcggcaacagagcaaggctctctctaaaaaagaaattaatcatttaatattaaaattaaaaattaattacttgatttttaaattgtaaataaattacttaatttttaaattaaaaataaattagctagctgggcatggtggctcatgcctgtaatcccagcactttgggaggctgaggcgggcagattacctgaggtcaggagttcaaggcccgcctggccaacatggtgaaactctgtctctactaaaaatacaaaaatgagccaggcacagtagcaggcgcctgtaatcccagctattcaggaggctgaggcaggagaatcgcttgagccccagaggtggaggttgcagtaagccgaaattgagccactgcactctagactgggcgacagagcaagactctgtctcaataaataaataaataaataaataaataaataagtttttaaatttttaattaaatttaattttttttaaaaaaagacttagtattggatagaccagtagggtgactatagttcaaaataatccattgtatatttcaaaatacctagaagagaacaattggaatggttggagcataaagataagacaaatatttaaggtgatggatatctaaagtaacaaatccttgcagattatacaaatgtattacactatcacatgcatcctgaaacaatgtacatctcttatgcattgatacaaaaatttaaaaaaagccaggtgtggtggcatgcacctgcagtctcagctactcgtcaggctgagtccagaggatcgctttagcccaggaattcgaggcagcagtgagctgtgatcacaccactgcactccagcctgggcaacaaagtgagagactgtctcaaaaatcaattagtcagtcaatcaatccaaaaagaactcaagtccacgtggtccgattccaaaactatcaccctgaaccatctgatctctggtctcatgtattcaaagacattggtcaggtggggcacagtggctcatgcctgtaatcccagcactttgggaggctgagacgggcagatcacctgaggtcaggagttcgagaccatcctggccaatgtggtgaaaccccgtctctattaaaaatagaaaaattagctgggcttggtggcacgtgcctgtaatcccagctactccggaggctgaagcaggagaatcgcttgaacccaggaggcggaggttgcagtgagccaagattgcgtcactacactccagtctggtcaacagagcgagactccatctcaaaaaacaaacaaacaaacaaaaacaaaaacaaaaacagaaaaccccaaagacattagtcaggctttcaagacttctcattacttctttctccctgacatatcccagcagtgtaagcccaagaagctgagacatcaatggaaagatggtatcctagatattagtttcctcaaagccttcaacatgtccttgtttctcaggctgtaaatgagtgggttcagcatgggggtgaccacggtatacatcactgatgctattgcacccttcctggaggagtgggtagccccagaactaaggtacaccccaaaccctgttccataaaacaaggaaacaacgattaaatgtgacccgcagatggaaaaagctttatactttccaccagctgatggaattttcatgacagaggagacaattcgtgtgtaagagaaaatgatcccagagagaggaacaacacctaacaggctggtcaccaaatacaccaggatgttattgatgaggacatcagaacaggcgagcttgagaatatgagctagttcacagaaaaagtggggaatttccaggtctatgcagaaggtcagctgtagcaccatcaacgtgtgcagcagagcatccaggacactaacgatgaaggacagcagaagcagcagcccacagagtttggggttcatgatgacattgtacctcagtgggtgacagatggccacaaatcgatcataggccatcatgaccagaattccattttccaatccaacaaaaaccaggacaaagcagatttgggtgaggcagcctgtgtaattgatggattgagcctgtgcctggatgttcaccagcatcttgggcatcgtggtggaggtgaaacagatgtcgaccaaggacaggatagagaggaggaagtacatgggggtgtggaggtgggagtcagagttgacggccaggatgatgagcaggttccccagcattgtggccaggtacatggacaggaacagcatgaagaggatgggctgcagctccggatcccctgacaatcccaagagaaagaattctggagtgtctgagaagtttcctgctttcatgttgttgatgagtcttgatcttgtcaatattatcaaaaccaaaccagttataagttatagaccttttttccttccttccttccttctttctttctttcttccttccttccttcctttctttttctttctttctttctttctttctttctctctctccctctctctctttctctttctctctctttctttctttctctctctccctccgtctttctttctttctctttctttctttcttcttactttctttttctttccctccctccctctctccctcctctttctttttctctttctctttctttcttttctctttccttctttctttctttctcctttttctttctttcttcctttcctttctttctctttctttctctctctccctccctccttccctccctctctccctcctctttttctccttccttccttccctccttcccccctctctttctttctctctcttttccttccttccttcctttctctctctctctctctttctttccttccttccttccttcctcccttccttccctccttctttctttccttctttcttctttgcagggtctctctctctctgtcatccatgctggagtgcagtggcatgatcatagctcactgtagcctcatccccctgggctcaagcaatcctcctctctcagcctcccaaatagctgggatgacaggcatgaacccccatgcccagcctgttctttacttccttcctaggtaccctatcagtgtctttctcacccaccaatttccctttctcattacagtttgtgaaaataaaaattaagccctctttatctagcagcataagcccctcccactatttttatttgccttcatctgtctttcatttgtatcacagataatgttaataaagaaaattttaacagtaagccatgcatcagaccctctttccattatttttttcttttctttttttttttgagatggagtctcgctctgctacccaggctggagtgcagtggtgggatctcagctcactgcaacctcttcctccagggtttgagtgatcctcctgcctcagcctcccaagtagctggaactacaggtgtgtgccaacacacctggctgatttttatacttttaacagagatagggtttcaccatgttggccaggctggtcttgaactcctgacttgaagtgatccacccgcctcagcctcctaaagtgctgggattacaggcttgagccactgcacccactcttcctattattactggtgcagcccctggttcaggcaacccctgagccttggcactgattcctggaggagtcctgtgtgagtcagcgccaaacctttcctgttccttctggcttatccagattcttgagaaattgattctggggcccccaaagcaggaagtaaagaattgatgtatgccggcaatgtcaaaacatcagcctgctgttctcataaacccataagttaaggaaattctgtaatgatgactcaggagttggggcaaacatattatagaatcacagcatgtgaacagttgaatggtgcagtgagcccatctcagccctttgcttcacaaattgagttcctggccagacacagcggctcacacctataatcccagcactttgggaggctgaggcagaagggtcgcttgaggccaggagtttgagaccagcctgaacaaagtagcaagacccatctatagtaaacattttttaaaaattaaattaaattaaaaattagccaggcacggtggtacgtgtctgtagtcccagcaacttgggaggctgagttgggaggatcacttgaacccaggagttggaagctgcagtgagctttcatagggtcactgcatgccagcctgggcaacagagcaagactctgcctcttaaaacaaatacacaaacaagctgggcgcggcggctcaagcctgtaatcccagaactttggaaggctgaggcaggcggttcacgaggtcaggagatcaaaaccatcctggctaacatggtgaaaccccgtctctactaaaaatacaaaaaattagccggacgtggtggtgggtgcctgtagccccagctactcaggaggctgaggcaggagaatggcgtgaacccgggaggtggagcttgcagtgatccgagatcctgccactgcactccagcctgggcgacagagcgaaactctgtctcaaacaaacaaacaaaaaaccaaatacacaaacaaaaacaaaattcaggcccccaaccgggagctggcttttactggagaaagacaaatgattataaaagcttcaaccattggtgcataaaacttggactcagacagttgtcagttccgtcatgtatgcctcaattgtgacatggatccgtgacatgagaaggtccctgaacctctctgagcagactcaagtttctcacttctccgatgggaactggtataaaaatgtgcatggggtgttgcagggatgaaaaatgaatagatgttaggataggtgtatcctagcacagtgctcaggggtcctgcaataaccttttatttatttattttgagatggagtctcgctctgtggctcaggctggagtgcagtggcacgatcttggctcactgcaacctctgcctcccgggttcaagcgattctcctgcctcagcctcctgagtagctgggattataggtgtgcaccaccatgcccagctactttttgtatttttggtagagacgtgatttcaccatgttgaccaggctggtctcaaactcctgaccccaggtgatctgcccaccttggcctcccaaagttctgggattacaggcgtgagccaccacgcctggcctgcaatgacctttcctatcatttttgtttctagctgtggacaatgcttgatgcctcagggacatgggggtgagatggggtgcaaaaggaagaagcagggaagatatcccaagaataatgtcaggccgggtgcggtggctcacacctgtaatcccagcactttgggaggccgaggcgggcagatgacctgaggtcaggagtttgagaccagcctggctgacatggtgaaaccccgtctctactaaaaaaatttaaaaattagccaggtgtggtgatgcatgcctgtaatcccagctacttggagactaaggcaagaggattgcttgaacctgggaggtgcaggttgcagtgagctgagatcacgccacttcactccagcttgggtgatagagtgagactccatctcaaaaaaaaaaaaaaaaaaaaaaagaagaagaatgtcttagggctgagcaaagaaggcatgtgctcaaaatcccactgagggttctcctagtgtaataaggtacagaaaagaaagaactgggcttgacacagtggctcaagcctgtaatcccagcactttggaaggccgaggtgggaggatcacttgagcccaggagtttgagaccagcctgggttgtgtgtctgtactctatctagcctgggtgacagagcaagatgctgtctcagagaaaagaaaaagaaaaaagaaaaagccaggcgcagtggctcgcgcctgtaatcctagcattttgggaggtagaggcaggcagatcacttcagcccaggagttagagaccagcctgggcaacatggtgaaaccccatctctacaaaaaatacaaaaactagtcaggcatggtggcatgcacctatagtcctagctactcaggaggctgaggtaggaggatcacctgagctcaggaggtcgaggttgttgtgagccgtgattgagccactgtactccagtctgggtgacagagtgagatcctgtctcaaaataaagtaagaaagaaagaagctaaacaaacatcagtatggggatagatacacaaattatggcactattattacatgtaataatagtgttaaactaagcatagtgaatgcccaccaatttcagagagtggtggtccccaggaagggaaggagaggaataaaaacaaatcaagaggacttcatgtttaagtgttatactttattgttattattattatatttagtattttaaatctatttttaaaattaaaaaaaattttttttttttgcagagatgagctcttgctatgttgcccaggctatgttgctatgttgcccatgcctgtaagcccaaagtgctaggattacaggcatgaaccaccacatctggcctgttttggggttttaaaagagaaaccgaaagactggaaatgtaagtgagtgggtctcaacttcctcttctggagtttctcactgtcaagagatggggacaagagtcaagttatttaagggtgaaatctggcaacagacatggtgaagattgaaaagccagacacatctcatcaaagccccatctgcagtcaaaagaatgaggaaaaccatggggccaggcatggtggctcatgtctgtaattccagcactttgggaggccaaagtgggcggatcacgaggtcaagagatcaagaccatcctggccaacttggtgaaaccccatctctactaaaaatacaaaagttagccaggcatggtggtgggcgcctgtaatcccagctactcaaaaggctgaggcaggagaatcgctggaacccaggaggcggaggttgcagtgaactgagatggagccactgcactccagcctggtgacagagcgagactccttctcaaaaaataaaaaaaagaatgtggaaaaccagagaactgtagattccttttgtttatttgtttgttttatgagacagagtcttgctctgtcaccaggctggaatgcagtggtgccatctcagctcactgcaacctctgcctcccgggttcaagcgattctcctgcctcagcctcctgagtagctgggattacaggtgcatgccaccatgcccggctaaatttttgtatttttagtagagatggggtttcaccatgttggccaggctggtcttgaactcctgacctcaggtgattgatccgccttggttcccaaagtgctgggactacatgcgtgagccaccgcacttggccagattcctttttgaagggactaattcatacttaggtagggaaggagtccctaggatttagaagacagaatgagagctgaaaataatgaaatctgattataaattgtaagaaaacaggggaagtaaatatatcatgaaaagggtcaccgattagtttggaatctcacttataacaattctgctgaattgtctcttactttatggttgtcctccagataagatgggagaaaaaataaaataaaaaacttgttcagtttctcacagcatttattgggagcatttcagattaccttgaaggcatcagtaaggaattctccattttttttcttggagaattgtaagatgaaatggaagatctatccccaagaagggcagatgaaccaagtaaggcaacccactcttgggcaagagggatcatctctggagcaagactcaggtgtgatgtttcctaacatgagcggggctgttgagtggagtggtcaccggtagattatttgcagtctctgtggcccctaggagctcaattttcaaagctgctcattagctagatgtgtacagtactgtcatttcttcccctaaggcagctcaaatccttaatgagcacaggtcagacgtgagcacaaagggggaattcctggatggttgactttctgaccccaagggacaagctgtatgtcattctcttccaaccacatttcctcttatcccgagggtatctcattcttggatcctaggatcggacccctagggagctggtggaatcctccttagacagaatcccagctttctctgagtcagaaattgcttttttttttttttttttttttcaaaccaagtctcactctgcgccctggctggagtgcagtggcgtgatctcagctcactgcaacctccgcctcccaggttcaagcgattctcctgcctcagcctcctgagtagagtagctaggattacaggcacacacgacacctggcaaatttttatattttcagtagagacgaggtttcaccatgttggccatgctggtctcaaactcctgacttcaagtgatccacacacctcggcctcccaaagtgctggaactataggcacgagccaccgcacctggcatcaggtatttctttataccaacacaataatggcctagtacagtaagtttttggaaaagaaatggtgacataatgttgacaaaatgcagataaagcccaaacccagtctgaaacaaatgaagaacaaaacctaaagttgatagggtatgaaatggtgcagtgatggtgacaaaaaatggggcctgtgtgggtttctctttaaatattgaccctaaacttgggaagacaaggggaaaaatgtctgcattcataatcaaaggaatgatacttccatcgtttgatattttatgtagtttactaaggaatgattctattacgattggaaattacattgacaggcaaaagctattatgtatgaaaaatgagaaagaattagacaatggcttccaacgtaaatattaaggagaacaggtctttaagaagacagttctttcaaaaaaaaggccaagcgtggtggctcacgcctgtaatcccagcactttgggaggccgaagaggcagatcatttgaggtcaggagtttgagaccagcctggccaacatggtgaaaccccgtctctactaaaaatacaaaaattagccaggtgtggtggtgggtgcctgtaatcccagctacttggggggctgaggcaggagaatcacttgaacctgggaggtggaggttacagtgaacagagatcgtgccaccacactcaagcctgggtgtcagaaagaagacaggtctttaagatcctaagtaggaaatgataggtaaaaagtgaaagatagggaaagctgaagctatatgaggaaactcatagtaaatgttctctgctttccccttaagcttttcttttttcttttctattttttttttagagacagggtcttgctctgtcgtccaggcaagagtacagcgatgccatcatagctcactgcagccttgaattcctggactcaaggaatcctcctgcctcagccgcccaattgactgggactacagatatgcaccaccacatccagctatttttgtgtgtgtgcaaaaatgggaactcactatgttgcccaggctggtctcaaacacttgatctttccacctcaggatcctaagtagctgggatagccaccgtttcgccaccatgcccagcctaaaatcaagacatatgaacaagagaattcacaagttttctgtttctctgttgcaccaaaggcagttccatcatgacccatccagtatcttctccttctggattcaaggtgtttttgatcttgggtcttgattttgtgtggcatgtacaacctcaaagcaatatggtgaactttttttacctgctctatccctaatgtatatccacattattgaactgcattgctcaccatttatcaaaactcccatgctgccctgacacatctctggcttctcatctgaattggcatcaacacagagacctaatgcattcaagtcattggcacctgactcctgttctttaaacacccagctatgccatgattcaggataatttattttcttttatttttgagacagagttttgctccttcacccaggctggagtgcagtagtgcaatctcagctcactgcaacatctacctcctgggttcaagcagttctcctgcctcagcctccctgagtagctgggattacaggtgtgtgccaccatgcctggctaatttttatgttttagtagagacggggtttcaccatgttagccaggctgaacttgaactcctgacctcaagtgatctgtctgcctccctaaatgctgggattacaggcatgagccactgcacccggccccaacttcttcaccctttcggccttactgcatctcctctcctaatgcatagaggcctccaagccatctattcttcaaccatgttgctatttatttatttttatttattttgagatggaatcttgctctgtagccctggctggagtgcaatggcgtgatctcagctcactgcaaccctcacctcccgggttcaagcaattctcctgcctcagcctccctgagtagctggtattacaggtgcccgccaccatgcccagctaatttttgtattctatttatttattttgaaatggagttttgctcttgttgcccaggctggagtgcaatggcaagatctcggctcactgcaacctctgcttccaggttcaagccattctcctgcttcagcctcctgagtagctgcgattacaggcatgtgccaccatgcccaggtattttgtatttttagtagagacggggtttctccttgttggtcaggctggtcttgaactcccaacctcaggtgatccacccaccttggcctcccaatgttatgggattacagccgtgagccaccgcgcctggccaacctcatttctttaactaggtaactgagattcaatcatatattttccaaaacctcaaattccctactctctgtcctatcataatacctgccctggaaaacgctaaccatctgtctctcctgcctacataattctgccgccacgcggtgatatgggaagcgctaaaaaatttgagatcacctactctaaaggggccttcgacacttcaggaaatttccagtgggcaaagatcttttcatgatttctgcaggattttgaattcacaccatctcaacttccctcttttttttttttttttttttttttttttgagacagagtcttgctctgttcccaggctagcgttcagtggcaccatctcggctcactgcaacctccaactccctggttcaagctattctcctgcctcagcctcccgagtagctgggattacaggcacgcgccaccacgctcagctaatttttgtatttttttagtacagacgaggtttcaccatgttggccaggatggtcttgatttcctgatctcgtgatccgcccgccttggcctcccaaagtgctgggattacaggcatgagccactgcgcccggccacaacttccctgtttaataacaaatgattttacaacttactgcagagagaaatagtaacgaccatgagaaagatttctcaccttctttattttttctcttatcctagattcgagagatttctcaccttcttgacactagtgcgaaagtagtccagtaacaacatcaccagttctttcttctttcactctgcaagcaatgagatgtctgccttcttatctacagccagtatctcctgcttttttttttttttttctttgatacagagtctctgtcacccaggctggagtgcagtggcacgatctccgctcactgcaacctctacctcttgggtccaagagattctccggcctcagcctcctgagtagctgggactacaggcacgcaccaccacgcccggctaatttttgtatttttagtagagacggggtttcaccatgttggccaggctgatctcgaactcctgacctcatggtccacccgccccggccaaagtgctgggattacaggcgtgagccaccgcgctcggccatctcctacttttctatgcaagggtttctcatcattggcacgactgacattcaggacctggtatttctgttagagggagtagggcattctatactctaaccactagatgtcagtagtatcccgggtagtggtaaaaccaaaggcgtctccacaggtggcacaattgtccttgttaagaatcaaaacgtgcctcactcataggtgggaattgaacaatgagatcacatggacacaggaaggacatcacactctggggactgttgtagggtggggggaggggggagggatagcattgggagatatatctaatgctagatgacaagttagtgggtgcagcacaccagcatggcacatgtatacgtatgtaactaacctgcacaatgtgcacatgtaccctaaaacttaaagtataataataaaaaaagaaaaaaaaacgtgcctggcgccgtggctcacgcctgtaatcccaacactttgggaggccaaggcgggtggatcacttgaggtcaggagttcgagaccagcctgaccaacatggtgaaatcctgtctctactaaaaatacaaaattagccagccatgatggctaattacaggcttcatacctgtaatcccagctactcgggaggctgaggcaggagaattgtttgaagccgggaggcggaggttgcagtgagccgagatcgcaccattgcactccagcctgggcgacaaaagtgaaactaagtctcaaaaaaaaagggacccagcgtggtggctcacgcttgcaatcccagcattttgggaggatgaggcaggtggattgtttgagcccaggagttcaagaccagcctgggcaaacatagggaaaccctgtctctatgaaaaatacaaaaattagacaggcgctgtggcatgcacctgtagtcccagatacttggggggctgaggcaggaggatcacttgagcccgggagatcgaggctgcagtgagccgtgcactgcagcctgggtgacagagcaagacttgtctcaagaaaaaaaaaaaaaaaaaaggcatgatactggcataaaaatagaaactaaaggaacagaacagagagcctgggaataaatccaaacatatatgatgaactaattttcaataagggcaccaagaggacaaaatgggaaaaggatagcctcttccgtaaatgctgccaggaaaactagatttccacatgcaaaagaaggaaatttgacccttatcttacgccatacacaaaaatcaactcaaaatggataaaagaccaaatatatatatatatatttttttgatattacaccaaaagatcagactacaaaagcaaaaattagtagacaaatgggactacatcaaattaaaaagcttctacatagcaaaggaaacaatcaacagaatgaatcggcgatccacggactgggaaaaaatatttgcaaaccacatatctgataaggggttaatatccaaaatttataaagaactcttataaatcaatagcagaaaaacaaataacctgattttaaaatgggcaaagggtctgaacagacgtttttccaaagaaggcataaaaaaggccagcaggtatatgagaaggtgctctacatcactaatcatcagggaaatgcaaattaaaaccactgtgagatatcacctcacatccttaaggagaactatcatcaaaaagataggagaggccgggcgcggtggttcaagccggtaatcccagcactttgggaagccgtggcgggcggatcacctgaggtcgggagttcgagaccagcctgaccaacatggagaaagcccgtctctactaaaaagacaaaattagttgggcgtggtggtgcatgcctgtaagcccagctactcgggaggccgaggcaggagaatcgcttgatcccgggaggcggaggttgcggtagctgagatctcaccattgccccccagcctgggaaacaagaacgaaactccattgcaaaaagaaaaaaaaaaaggaaaaaaaagatgagagatgaatgttggcgagggcatcaagcaaagtgaaccctagtacattgttggtgggaatgcagactggtacaacctttgtggaaaacagtattcaggctcttaaagaaatctacaacagaactactatatgacccagcaattcctcttttgaatatatgcctaaaagagatgaaataatcacctcataacgatgtctgcactttcattttcattgtagcattatttacaatatccaagttacggaaacaacctgaatgtccattgatgctcacatgaatacgaaatacaaaatagcagctatgtagtctgaataatattctatctcttttgtatttatatatgatgtcaacattaatatcatataatattgatatatatttcatattatattaaatattaatataatatgttgtatataaatatatacctattacataatagatattcccattatgttatatatcatgtaatatattatatgtaatatatgtatataatatactatatgaaatacatattatatattatatgtattattatatgtatatatgctatatattatggtgtatatattatgtattatgaaatatatattacgttatgtaatatagattatatattatatatgaatatcttatatccatatatattccatacatacattttatatgtgtgtgtatatatatatatacgcaccatggtccatcccctcaataatatattttccaaaacctcaaatttccttctctctgtcttttataatacctgccctggataatactaaccatctgtctctcctgcctatataattctgcccctactggttacatgggaagccttggtttcctaaagtgttgagattacaggtgtgagccactgtacccagcctgattctggaattttgtatatgcagactcctcctgctaaaataatatatattatatataatatatattccataatatatataacatacatacatatattattttagcatatattatataatatacggtaataatacacataatacataattataataaatatgatataatatatattccattgtataaaacatataatatatataacggaatattattcaaccttgaaatagaaggaggtcctgacatttatcacaagatgggtggacctggaggacattacgctaagtgaaataagccagacacaaaaagaaaaatattgcatgacgtcacttacatgaggaactttttttaatcaagagagacagctcaaatacacagaaataaagaatgaggcagttggggaagaaaatgggaagatgtgggtcaaaaaatacaaaatagcagatatgcaggatgaacaccacacaggtgatggtgattttacgcccttcccaaggtgtcattcagaggcacgtggtctccatctgaccctcactggtgatattgatttgatcacctggtccagatgttgtccaatttcttcgctgtacaatttctattactttttctccattccaacatacgagcagtttatagagaggcatttaaggcaattcaaatattctgctcgtcatgcaaatgtcccccagttgtgtcatgtagatgacaattcttgcctgattcaacctttaccactacgatggctacaaaatgctgtgggttgtggttgaaaatttgagtcttgagtagaaattggagaaatatgctggaccgtcagattccaccggggcacggccgccatgccaatccaaacttcaaaactacaattcccagcatcctctccgccccgcttccgtattagacgccgccaatgaagtcccgcgagaattggaaggcggcagtgaagcggaagccattactctctggagtcgattgccccgagacacatgggccaaggaggggtcagcggcgaattctttcggcctgttggggacccctcgtgtccccacgccagactggacctcccgtatgaacttctcttcgcatcggcggcggcttccgtcacctccgctcccccgatcctattcccagtcgtgtaagccctgctttccttaacccttctccccctcagttccaggggtcacgggaggcctatctggcggtgaggactaagagggtacgagggtcgggggctaaagagctaggcatccagacgaggggtgcgtttagatctcgcgatcagcgatatgaaaagctggggacgcgaaggataaaattggaccattgcagctagtgatgagagaagcattggtcacctgatcctgaaaagccctaagtctctggtgggggcggaaaagcccggctgaagtgaattcaagagtttgggggcagttcaggagattggggggcgtcaggatttggacatcgcgaggagaaatcaccttctttctgcgctgtagtcaattttatctcgtgaatgtcagcacattggtgttcttattagcacttaccttgagtaccttttatatttttaatttaagaccttctggttgcacttttttatttattttaattttagtggactcttgtaaatagcctatatgtatatttactattcagttcaacattttgttaattaacttgagttagtccagttatacttatcgtgattattaatattttccattgaattttaccgtcttattttgtggtgtgtcctttcctatgcacatattttaacactggaaaataggacatacatgcaaaaaaagtatgattacacacacacgcagacttacacacacttaaaaggacaacagtaaagcgaatttacaaaccaggccaagaaagagattattaaatctcagaaagctgtgtgcctcttctaaactgcatcctcctctcccaccaatactgtctccgtggatttgactgcgtatacatcttttccagaaaatatatttcctaaattttggtaattatttgtgaatgaactcaggcgcttcagtatttttggaaacaatctttttctgtattgattcaagcacacctttgtaatttagagatttctaaatatcttgtagatgaagtacttacacctagccattctttttcaggaatgtcatggcttaaattctagtcagttcaccaaattccacatactggacttttgttttcaagttgtggtgaatctatatttgaactttgggaatattgtcgtttttatgccattgagttgcagttaattgatttacatcatttatttacatcttctttaatgcctttcaataaagtgttttttgttgttgttgttgttttttcctttttgagatggagtctcacccttgtagcccagactggagtgcaatgacaatctcggctcactgcaacctctgtctccctggttcaagcggttctcctgcctcagcctcccgagtagctgggaatacaggcacccaccaccacacccagctaaattttgtatttttagtggagatggggtttcaacatgttggccaggctggtctcgatctcctgacctcaggtgatccaccggccttggcctcccaaagtgctgggattgcaggagagagccacgatgtccggctcagtaaagttttataagtacctgcaaaaaggatttaggttgtttttgttatatttattcttgggaactttgttttttggtgctcagaaaagtctaacttttgtgtagtttgttggatgttcttcgtagacaaggaaaatgtgtacaattcaaaaggaaaatacaaatatttattttatacagacgataaattgtcttttttgtttgtttgtttgtttgtttgttttttgtgctggactgggtggggacttcccttgtcattgactggagtttggatggcacactctaggcaagcctgtttgttttctgatcttaaagggaattgtcatttgtgtctgccgaaggcttttctgtcgaatagtttttattaggtcaaggaagctcccctcttttcctacttgagtttttcttgtgaattgctgcaggcttttaacaagtgattttttttttttttttgccattatgtatctgtttattgatacattttgtatctgtttgatacaaaatctatattgatagttttgtatctgtttattgatacatttctagtaccttaaattatggcactcagtactgctgtgtaacaaattaatgagtgaataatataattttttttctatcctgtagtgtggcaaattaaaccaattgattttctcttgttacattgaatttgtattggtaaataatttggaaaggacatgttactatttgttacttttggcttcggtttgctaatactttgtttggtgtttttggatctatgcttgagtgaaatgttccttttctgtttcagatttatgccagcctcataaaatgggatgagaagtgttctgttttctaaactctggaatgttttgcataagaatagaatattttgttccttagaacgggagtggtacctggaaaaaccatttgggtctggagttttctttgtggaaagttttaaagctattgtttctgttcttttaaggtttgtggggcattcaggttttctgtgttgttatgatgagtaaaatttctttaggaatttatttattccatctgaggtttaaatcgtatagtcagggttgttcataacatactcaaatttttaatgcttgctgcatttgtaatgttatccacttttttatttataataattatatgttgctttttacaaaaataaattccatcagaatgttgtcagttttcttcttaaagaacttctggcttgattgaaccactttatgatatatatgttttctattttataactttctgattgttatcattttcttcctttttgggatgtttctttccagtttcttatgttgaatgcctgtcacatcccaaagaattgcagtatcatactttattgtattttaattataaatatcaaatatcatggcttctttggcatgcagatttagaatttttttcttttaattttcatttctgtgactttttttctggttatcttttggtcattgtttgccaactgcattgctctgtggtcaagcattttctgagacaaacatggccccatgagtgctgtctcatcatgttcaatctgcacatagttattgaactgcctgcttaaactggatttgtgagagctctggtggtggcttcatccatttctccttagaattctgtccccccttttttttttttaatttttgtgttttccttttttttgaggctgtgttttatacacacaggcacacacacacacctctttttggatttataactttttattatgtaatacttcatttttctctatgagcctttttgccttaatctattctgtctgatactaacattcaaaccagctttctttttttttttttttacttgccttatatatccttttatttccattcttattgtactcttttttctttctttctttctttctttctttcttttttttgagacggagtttcactctttttgcccaggctggagtgcaatggcgcgatcttggctcactgcaacctccacctcctggaatcaagtgattctcctgtctcagcctcccaagtagctggaagtacaggcgcatggcaccacacccagctaatttttttattttcagtagagatggggtttcatcatattggtcaggctggtctcgaactcccaacctcaggtgatccacctgccttggcctcccaaagcattgggattacaggcatgagccaccgcgcccggctcttattgtattcttatattttagatatctcttgtacgtagcatataattggattaatctattctgtgaatattagtattttagttaaagcatttattctgttagcatcttctgtattaatatatttgaatgttacatttgtcttctgttttttctctagcttcttttgtgtatttttgtcattctccttttttattttctgtacattttgaatttatttactctattatttcagtggttgttctaaataattcttacccatgctcattcactaaatctagatttgcatatgttactctcctgatttacatggttttcttatgcattttcattctttctttattgatatatcatagttgcacatattgagttctttttttaaacctcagaagaaattattattgctattgcataccatcatttcttgtttcattatactcacatgtttatcactttgagcactttacttggttcttacactttttggtgtaattcttccactgtttgctttggttctttaattacttctttctccctgaggtatgtctttgatgatgtctcttttctgtgggttgcaagcccacaggaactttgttttttggtgctcagaaaacacctctttctctctttctcagtggacatttttggtggtaatagaattttatatttcagaactatgaagatgttccattatcttctggcttccactgttaatgatgagaagtcagctgtcagtctaatgtttgtttgtttgttttctgagacagagtctcactcttgttgcccaggctggagtgcaatggcgtaatctcgtctcactgcaacttctgcctcctgggttccagcaattctcctgcctcagcctactgagtcgctgggattacaggcatgggccatgacacccagctaatttttgtatttttagtaaagacaaggtttcaccatgttggccaggcagcggttttaggagcctagaaatgtgagtttttcgttttgttttgttttgagacagggtcttggtatgttgcccaggctggtctcgaactcctgcgtgcaagtgatccacctgccttggcctcccagcatgctgggattacaggtgtgggccaccatgcccaggcttactttgtttcttaatggagagatatttacggtgtgttttaacaagacctccaggtgactcccatgtaacttaaagtttgagaactattgcttaaaaggtaacctgtctttttctcctctggctgctgttcagatattctttttaccgttggtattatctggttcattgtgcttaagattttatctctcttcaatctgtttatattttccttcaaaatgaaaaatctacagccactatattttgcagtgattgcctaggctccttctctgtctctcatcagtaactccagttagaaatggttcaattccttatcttctgcccccacgtggttcttagctgtatttatgttcctcaactctttttctgtgcttcccttgcatttattgctacaactggctttgaaacttcagccttcataaaaatttcatgtagagtttattaaaatactgattcatcagcccaccccaaagagaattgaactgagatatgatctgggtgtcagagttacttaaagtgttccaggggacgcttatgcagcagactatatttaagaaacaaattattattattattattattattggctgtgtataatctaaaagctatttacttagggcttttgttgtgggtttccattttgctttttttttagcaattgtaattgccctttagaaatcataaatttttaattttctgaatgttaatttcttgccagcacatgaatttgaaacctatcatctgtctgtactttgtgttgcatttgaaatagttatgcatggaaggtttaattggggcacctaggttgcttgttggaaacagaattcctaccctgctccccaccccctgggacatctcatctagctggttgaaaggagggtatattgatttactaatgtaatgcatttctggaccaagaaaatggcatatgatgttctcacaacctttgttgccttctctgtctctcgctatatatatattgtatatattatttatatactttttttcttttttttttttttgaggcagtgtctcatttctgtcacccaggctggaagtgcagtggcatgatcttggcttactgcaacctccgcctctcaggttcaagcaatcttcccacctcagcctcccaagtaactgggactacaggcatgtgccaccatgcctggctaatttttttgtatttttagtagaaacggggtttcaccatgttggccaggccagtcttgaactcctgacttcaaatgatctgcccgcctcagcctcccaaagtgctgagattacaggcatgagccaccatgctgggcctatatttacgtgaataacagtggtagaaatggttctagcaagggcagaaataccagtcagtaaaagtaacaaaataattattctctctacagtatttacatctgcaaattctgaatatcctgggatactgtgattaagttgaatatggggataaaatcaaatattgggagaattatggtcctgagaaagctcataatggaacagttttgggcaacatttgttttggaccacaaacttgatggaggaggcagatcttctaaaactgaggagcagggctggagcaagggtgaggtttgtgagtgcagagccagggagccactcgctctgagccaaccttgtgcttgtctgacaccagaagtgcttccttaaataccacactcttgtctagcagccttggttgcctcatcccagtcctggccctggtgaggagaaaaacagatcccaatgagaatagagtaagatgtgtagaaatagaaaaatagaactgctttcaccatgctgtaaagaaaattaaaagagaaattaagcaaccccaacagctctgaaaaattaacctgtccgttctaactcatccatggtgacagcattccaatgacactggtttttttttttttttttttttttttttgagatggagtctcgctctgtcgcccaggctggagtgcagtggcacagtctcagctcactgcaagctctgcctcctgggtttcacaccattctcctgcctcagcctcctgagtagctgggactacaggcgcccgccaccgcgcccggctaattttttgtatttttagtagagatggggtttcaccattcacaggatggtctcaatctcctgacctcatgatccgcctgcctcagcctcccaaagtgctgggattacaggcgtgagccaccacgcccggctgatcctggttttgtttcatgtatcatgtagaaacggggcagaacgtctctgagttcatagatcctacagctgttctagacaccctgctccacatcctgctggggtcgcttagatgctgaaatcttcctgctttatttgtattcatggccaccagttctttgagactctctgatacagtttggatgtgtatccgccccctccccccctccaaatctcatatggaaatgtaattcccaatattggaggtggggcctggtggggggcgattggatcaggggggcagatttctcatgaatggcttagcaccatcccccttggcactgtcctcgtgatggcgggtgagttctcctgagatccggtcatttacacgtgtgtggcacctcctcccaaccctgctgtcttgctcctgcttcaccatatgctttgcctgcttcccttttgccttctgctatgattggaagcttcctgaggcctccccagaagcagatagcactgtgcttcctgtagagcctacagaactgtgagccaattaaacctcttttcttataaattacccagtctcaggtatttctttatagcagtgcgagaatggactaatacaccatcacccagcactgacaacccctgaaagtgatagaatcactcaggtgagaacttggccagaagctccactctgagctctggtttgcatcgttgcaaaacatcgacaaggttccacagactgaattgatgtgggtgcgctctctaagctccagccctctggacactttgtccttcatggagggtggtggtggatgttggccccagggtgttgggctaagccatagggctgtgtcctagtacctggattactgtttaatttcacaggaccttctgaggagatcccagaccccctacattccataggcccctcctttatggtctcccaaggtctgggtggctgtctcagtatgaaggcaaatgtagatcagcttgctcatcatccattcattctttcattccctacttattgtcttatttatatcaggcactggaatggtgaatgaaatatcatcaaagtaaaaagtctctactcacctggaatgtattttctagttgggcatacaggaaatcaaaacaagtaaactacatagtgtgcatggaggagacagcagagagataataatgcttacccggtgttctgtgtcctgtcctacatttcccaggatccttggagctggcaggggcatgtgactagttctggccaatgggctgcaagtgcttcagggtcaaaatatagacgacagaatgcatagttgtccagcttcctgctcatcatctatgaccaacatggccaagggtatcagttggttcagagacaagtggcatccttgaacaacaggaaaacttttgacatcagcctgggttgaacaagtgacatgagcaaggcgtaaactttccattttattgagtcattgagatttgggtttgtctgtttttgcagtaaaaaatagagcctaatcttacacagaacattacttggaaattagtgctttagggaaaaagaaaaggagtggagaattgggattgaaagaagcaggggtttgcattttaaaaagtggccaaggcgggtggatcagctgaggtcaggagctcaggaccagcctggccaacatggtgaaaccctgtctctactaaaagtacaaaaattagccggacacagtggcacacctatagtcccagctacttgggagcctgaggcgggagaatcacttgaacccgggaggcgcaggttgcagtgagctgagatcacactactgcactccagcctgggtgacagagcgagactccatctcaaaagaaaagaaaagagtggccagtgaatgccagatcaggacaggtaaagttgaataaagatctgaaggatgagagggggccaggcacactgagaatgtgggggaaacatttcaagcagaggagcagcaggtgcacagaccctgaggtgggagcatggctggcggggcctgatgcacagcagtgaggcttctgtggcttgggtgagggaccagtggcagagcgagttgtgggtgaggcggcagggacctgggcccttggtctgagtgagatgggacaccatcagaggatcttgaacagaggagcggtgtgatcttcattttacccataaagttacggctgtcatggaagctaagggaagtcagggacagcagctgggagaccagttaggaagcagttggaatgttctagaagagaagcgatgccttatgccaaggcagtagcagtgtaggtggtgagaagcaaccagatttttgtattaagttttaaagttaaggctggcaggatttgctggtgatgcaggtgtggtttatggaaaagaaagaggagagttgaaggtgatgacgagcaaggcttttgacttgagcccctgggaggctggagctgccatcaacgtggggaggctggtggcagcacagttgtaggtgtttaatgtgggatcctgttggctgttgcagtagggatactaagtagccacctggctgccactcactctgagtcattctgggtggggcaggtgccagggagcggagagtggcacccactataaatgaacaattctgttaagtaattgtgaaatcgtcagtggtcattttattttaatgataatggcattttagagtgaatgtttgtttactgagcctatagagttccatacataacccagtgttaaagtcttcagtttccagatgagaaaactgagttttgatgaactgactcttgggaggggaatgagcagaactgtgggcttgcattaaaggggagtctactgaggcctcagggacagggagaccttcacagaagtgcaatcagaacctgggtgtcagcacctccaaatggtgggggtgtttcacaatgtggacctgtgggagatgggggagaggggcccaggggaaccctgacctttaggggctgggcagaggagggatctcaagccagagtcttcaaaagagcaaccagagatgtgagcacagactgggatgagtgggctatggctgcaagagcagtggcattcccaggaagagggagatagattcatagtgagcaagatgatgtgtcaggaggtcaggcaaaggaagggtcaagatgtagtgtcaaggagttcccacataggggacagtacaggtgacataggtcactttgagaggcaacaagatgtggctccgcagtcacgtcagctgggctcacaacttccacctatgaccttgaccaagtgtctcggacccttggtgccttattctctgggtacttgagaataattccgggaggttgtgaggattaaataggagtggccctggaaagactcaggagaatgtctcataccttgtaaacactacacatgtcgttatttgtagaattggcattaatgttggtggggaaaggtggaatgggacctgcagaagcttgttagttgagcatgaatgaatgaatggtaggtgaggatggagatactgtgcctcaggaactgagcctctgtcaccctctctccccttcctcagcagtgacttaatgtcagaacccaaaggcacaatgactagaaaagggctttgtaaaaagaatgaaagcgtcatgcatctttgagttggcccaagatcaaatttggtgttgaataatgaatccccaaggcagagtttatacgttaaaacacacttcctatattattgttttgaaatgtttctgaatatctaaaacaattccaatagcagaaatactaattgatgttgaaaaagattgttataaccctggtaatgtttaaaagtggtaatattgattattgatctgagtcagatgttaaagtagcagcgtcacggttcttacatcagtgctgtcatgagagtcgcggtggaagccagagagaggaggcatgttcatacaaagcaaattaaatcccctcccgaggtgtgggccaccatacctcaccaatgtattgtggttttgatgttatttccttaatgactgatgttgttaatcatcttttcatgtgtttacagttcatttctgtaaatttggagaaatgtctgttctgttcaagtctcctgcccacttttttactgggttgtctttgttgttgagtttataatgatattaaatccctatcacatacatgatttgcaaatattttccaccattctgtgtctcattcactttcttgataatgtccttgatgttaattctaaatgtttggtagggttcaccagtgaagccccttggtcctggactttttttttttttttttgagacggagtcttgctctgtcgcccaggctggagtgcagtggcgcaatctcggctcactgcaagctccgcctcccaggttcacaccattctcctgcctcagcctcccgagtagctgggactacaggcactcatcaccacgcctggctaattttttgtatttttagtagagatggggttttaccgtgttagccaggatggtctcgatctcctgacctcctgatccacccgcctcggcctcccaaaatgctgggattacaggcgtgagccaccgtgcccagctggtcctggactttttatttaatggcttttgatgactgcctcagtctcttgttataggtctctcaattttctttttcttctagagcctgtttgggtatgtttcaaggaatttgatacatctagagcattgatccccaagccctgggccacagacaggtaccggtccctggccttttaggaacaaggccctgccgcaggaggtgagcggagggcaagtgagtgaagcttcatctgtatttacagcggctccccatcactcacattacccctgaactccacctcctgtcagatcatcagcagcattagattctcataggggcgcagaccctattgtgcactgcacatgcaagggatctagattgcacactccttatgaaaatctaatgcctgatgatctgtcagtgtctcccatcacctccagatgggaccatctagtttcaggaaaacactctcagggcttccactaattctatattatggtgagttgtataattattttaccatatattacaatgtaataataatagaaataaagtgcacaataaatgtaatgcactcaagtcatcccaaaaccatcccccctcacctcaccatccatggaaaaattgtcttccatgacaccagtctctgatgccaaattgggtggggactgctagtgtagatgatctaatgtgttggtgcataattgttcatggcattctcttacagccctttgaatttccgtaaggtcggtagtaatgtcccacttccactgatgattttagttacttgcatctttttttgttagtaattctagctgtagttttgtcacctttgttgatctttttgaaagaaccaacttttgttttcattaattctcctattctctatttcatttgtctctgctttaatctttatttcttcacttttgctttccctaggtttagtgtgtcaaggtagttgtttttgtttgtttgtttgtttgtttgtttgtttgagactgagtctcgctctctcacccaggctagagtgtgatggcacgatctcagcttacctcaacctccgcctcccgggttcaagcgattctcctgcctcagcctcccgagtagctgggattacaggcatgcaccaccatgcccagctaattctttgtatttttagtagagacggggtttctccatgttggtcaggctggtctcgaactctcgacctcaggtgatccacccaccttggtctcccaaagtgctgggattacaggtgggagccactgcacctggctggaactggtttttgtatgagatgtcttactggtggcttttcctaggcaaagggaataagatctcgagttcctactggaacctaagtgttagagatggggattcaggttaaatgagtggatgtgattacctgggcaaagcatgaggcatgcgaaggaatgggtaaagaatggctcttgagcagaatcagcctttagtggtgaaagaggacctctggatggtccagatgatccagagaagcagggaaagaaccaggagacagttgtagaggagccgagaatagagaatgattctcaaagaaaatagacaccacattttcgtgagactctaagactgaagtgcatttactggattcactgacacgggagtaaattgtattttctgtgaggatggggatgatggtagtggatgctgggtgtactgaattgggagatggtgaatgtagactgctcctaagtttttgctcggaagggggcactaaggggagccagggcaggcattggtttcaagatgggatagacctgagcatgtgtccatgcataggaaattgtctagcagggcgagaaatgaggctgaaagtaaaggagagccaggtagtgcgagggtccagagacggggatgggcctggagcagatttgaaaggattgccttgagaagggagggcagacatctctttgtcatagaaggaaaggaggaggtcatagatcagttgtgagaagactgtttaaataactagaagcaagaaggtaagaaagcctcattttttttctttcttttaagcagggtttaatatatgttcaagaaaatgcataggtcttacttaggtgatcagtttgaatttttgacaattgtgtacactgtacatctgaaaataggtaagtttctatcatcctagaaagttccctttgcttctttcagtctatccctgtcttatcctccattgaagaaacccccttttttttttcaattctatcaacttaattacgttttgcctattcatggacattatattgttggaatcagagcgtttcttgtgtgtccagtttcttttggccagcatcgtagggatttctccatgtagtgtgtctgcatagtttctttttattgctgagtagtattccattctgtaaacattgcaatttgtatatccattctctggttgatagatgtttagattgtttacagtatttggctattaggaatcagactactacagacatttttgtacgagtctttgtggatataaattgtttacagtttctcttatataaatatctaggagcagaattgttggatcagatagtcagtgtgcttgttaaaaactgccaaagtgttttccaaagtagttgaactatttcacactcctaccatcaggatatgagaggtgccagtgtgccccaaactcagcagcatttagtattggtagtcttttttattttggctgttctagttttaatttgcatttctctaatgactatgatattcaacaccattcgatgtgattcttactggttttgtgaaatgtctgtttattaattaaagtcttttaccctttttgttgggttgattttctttctttctttctgttttgaaggagttctttttattttttccaataagccttttgcactcctatctaggagttctttaatctgaatacgaattctttttcaggtgtatgcattgcagatatttttttcccaatccgtggttcactgttcattttccttttttctttttctttttttgtttttagagacagaatcttactctattgcccaggctggagtgcatgatggtagctcactgcagctgttctctatgaatttttaagtttctgattcatctcaaaagatgtttaaattcaaattcagtgagtggaggaggtggcagaagcataggtggccgcgaatctctaaagtgagagttgatgtgagaaggttgcacaggagactttgcccagagagcagatttccaaatcattgcctgtgaggtgaggctgattctagtgatgatgcagtccaggccatggcccaagggtgtatatgttggtgtggagtgtgggtgcaaagggcattggagtttggaactcatggttgatcctgggtggaccatcttcatggatagagccatcctaaatgatcgcaggcctcgaaggtgaaggaagagcagaagtctaggaccagagtgtttaatgagtgagggggtttaacagagttgtacttggtggaaaatcacttaggaagagtaattctgaacccacttatagcagatcaggggctgtccccccaccacatcaccacattgctgagagagtttacctaagtaagataaaagtccaggatcaggcagatcttgctgctcaaaagaggaaatgccaaaaaacaaaactcagagttttctttggtgagcaggagagacagatagcctttcactactcccgatgttctttcatttgctacagatgccagcttggagagtcacgtgagagcaagagagtagctttctggttgtcctggtgccctgctcaggcaaactgactgccattctctgaggatggcagctctgtcccccacatttggtaagttcttgggtcagtgcgtgccctgagaaagtgagtgcaagtggcccctgccacttgatggggtgaaagatacgtacaccatagagggctgctgggagaggatgggcaagtggaaaaggggtgggaacagagccccagcagccaccccagtgactgtgtctgctgagggtcttggtgggtctgggagcaggccagtgtccttatcattcatgcatgaagagggtgcaggtaatgggtaaccctgagttatctcatttattattttgatcactttcagcaaggtcacaactctagctctcagaacttgcatttcttcactcctaggttggaactatgtcacttcttatgagtatgtagcccaccaccctctttatgtttttggtggaacagggctgctctgacttgttatgaaactgatgtgtgcaagagaggtggggggaggaagagagagagaggattgaggatgtgaacactcagaatcagtgtggagcagtttcctggtttacaagtgttgtattatgagacagggcaggctctgattctcatgaaccctgttttctcctccagccacgtccacccaggattccacctgtctccaggactcagaatttcctgtttcttcaaaagaccattcctgtccccagaatttggacctgttcgtgtgcagtggtctggagcctcacacacccagtgttggttcccaggtgcactaagatctctgggtccctagagcaggagaggcacttcctggaagaccccaccagtgcatgctggaattcttgcagagcttcatctcagccagtggatgccagaacagggcccaagagagagccaaggaatattggggctgtcctggtgttggggaagttaggggaagtgatttatgtagcatctgtttccctcatgcttgcaaaatctcaggcccttgctcagccccagagacggggggaaataaagggcaaagctctcggagtgggctagaactggagggagattagtcccttgtcagggttgcatctgaagtgacggcacaggacaagatggcctcaatggggagagaggatgtctgaggactgatgcctggaggaaatgttgagccccgtagcaggccatctggaaatcctgtgttgggtctctcatgcccggtcttcaacctcagccatcttaccatgaacatcgttaggctggttcctcgctgaccccaagtttgtgtggcgttccaggaatcggtgactttccaagatgtcgctgtggactttaccgagaaggagtggcccttgctggattcttctcagagaaaactgtacaaagatgtaatgctggagaactacagcaacctcacttcactgggtaaggccagtgccatttctccacttattcatccatgaattagatgtttttgtttgagtatgttctgtgacccaggaactatgcagcggttcagaacgcagctgtgaacaagcagccccagcacccatgcttaatggggcctctcctgggtatcgaggcccatctattgcagggaccatggtggttctccggtgtgtgtctgagcttggcatgggcttctgaaatacgaaatccccattcttttggagggtcagtgtgtgggtacttgtgatcttatttcctatttctttttttttttttttttttttatttttggtgatgaagggttctcactatgttgcccagactgatcttgaactcctggctacaggcacgagccaccatgctttgcctgtggttttgttttctatcagtcaaaaacttttactgtgttccttagaaattttggcaccaccattttgctgctcctaagtcagacttgtccaccctcagaacactgaagacccaagtgttgagcccaggctactggaaggggttgtcctctgcatggccctccctcaacctgtgtctttcccgtgagtgtagggtatcaggtcggcaaacccagcctcatctcacacttggagcaggaggaggagccgaggacagaggagaggggcgctcaccagggcgcttgtgcaggtgagcgagccccaggcaaagagcggtgctgtgactctacctctattcagtgactggggtggagggaggtaggttagggagtgtcacccagggaaattgagagatgctccttccctctttttgcccatccattctctgacaaatcttttggtccacacactccttcatctttgactttcacattcccattattgggctctttgtcccattctttcatatttgatgtttctgatcatccgctttctgtcattatcaacatcatctgaattgccttaaatttcttttttcttttttttttttttttttttttttttttgacggagtctcactctgttgccaggctggagtgcagtggcatgatctcggctcactgcaacctctgcctcccaagtagctgggactacaggcatgatgccgccatgcctacctaattttagtattattagtagacatgggtttcaccatgttgtccaggctggtctcgaacacctgacctcaggtgatccacccacctcggcctcccagagtgctgggattacaggcgtgagccactgcaccaggcctgaattgacttaaatttctacccctggcattgccaaatatctcacatgaccagattttttaacaattgcttttgcaccacttttccttacatagccttaggatctgccaagaaatccacctgtcattgtcaccatcatcccaccattttccttttccaacaattaatacttttccaatttgtttcagattgggagactccatctaaaaccaagtggtcacttcttatggaagatatttttgggaaggaaacgcccagtggtgtgacgatggtaagatttccgtgggataattctggatcttccttccacgtctgaggagactggggcagcctaggttagaaaagcagttcaacaccagggcaagcagcttccctcagaggagactgtgtttcagagacactgggtattaccaagatggagacaaccctaaagctaacctcaagctactttacctagagtgtctctgagtgaagatttttatagctgtgtctcagatattgagtgttggggctcaatgcagtttttgttttattttatatttatgctgtacacttacttatcaatttagttttggtggtgtttattttttggggggcagacagtcttgctcttgttgcccagtgcagtgggcaacatcttggctcactgcaacctctgcctcccaggctcaagccatcctcccacctcagcctcctgagcagctgggactataggcgtgtgccaccacacttggctgatttttctattttttgcagagacaggatttcaccatgttgcccaggctggtcttgaactcctggagatccatcagcctcggtctcccaaagtgctgggattataggcttgagccaccatgcccagcctcaattcagtggtttttgtttgtttgtttttgttgttgtttttgttttttgtttttttttttgaggcacagtcttgctcttgtcacccaggctggagtgcaatggcacgatctcagctcactgcagcctccacctttcaggctcaagtgattctcctgtcccaccctcccgagtagctgggattacaggtgtgcaccaccatgcccagctaatttttgtatttttagtagagacagcgtttcaccatgttagccaggctggtctcgaactcctgacctcaggtggtccacccgccttggccttccagagtgctgggatgacaggcgtgagccaccttgcccagcctcaattcagttttaagcagtgaagaaatgctatatgcaaaaagctttgaaaaagtaacacatgtggagccttgtggcctggcattcacctattgtccttgatggagctcaaatggggcagggacagcacgtttgcacggcagatggttacagctctagtcatagtaatgtgcttctatctgttcatagcagtgtatgtggggatgacgcttagggttgcaatgaatatgagaattgcctttgtcagcacttacgtcttaaccaacaggaaagagccggtcttggagagaagtccactgaatacgctcacttgttcgaagtctttggcatggaccctcatctcactcagccaatgggaaggcacgctggcaagaggccctatcaccgccgcgactatggggtagcgttcaagggcaggccgcacctcactcagcacatgagcatgtacgacgggagaaaaatgcatgaatgtcatcagtgccaaaaagccttcaccacgagcgcgtccctcacacggcacaggagaatccacaccggggagaagccttacgagtgcagcgactgcgggaaagccttcaacgacccttcagcccttaggagccacgcaagaactcacctcaaagagaagccctttgactgcagtcagtgtggaaatgcattccggaccctctcggccctgaaaatccacatgcgagttcacactggcgagaggccttacaagtgtgatcagtgcgggaaggcttacggccggagctgccacctcatcgcacacaagagaacgcacaccggagagaggccctacgagtgtcacgactgtgggaaagctttccagcacccctcccacctcaaagagcacgtgaggaatcacacgggggagaagccctacgcgtgcacgcagtgcggcaaagccttccgctggaagtccaactttaatttgcacaagaagaaccacatggtggagaagacctacgaatgtaaagaatgcgggaaatcctttggcgatctcgtgtcccggaggaaacacatgaggattcacatcgtcaagaaacccgtggaatgtcggcagtgcgggaagaccttccgaaaccagtccatccttaagactcacatgaactctcacactggagagaaaccatacgggtgcgatctctgcgggaaagctttcagcgcgagttcaaacctcaccgcacacaggaagatacacacgcaagagagacgctacgaatgcgccgcctgcgggaaagtcttcggtgactatttatcccggcggaggcacatgagcgttcaccttgtaaagaaacgagttgagtgtaggcagtgtggcaaggccttcaggaaccagtcaacgctgaagacgcacatgcgaagccacacgggggagaaaccgtacgaatgcgatcactgtgggaaggccttcagcataggctccaacctgaatgtgcacaggcggatccacaccggggagaagccctacgaatgccttgtctgcgggaaagccttcagcgaccactcatccctcaggagccacgtgaaaactcaccggggagagaagctctttgtgtcatccgtgtggaaaaggctccagtgagcgcgcctgctttagagacacaggatgattcagaccggaaacagacctcgtgggtgtaagaggaagcctctgtgagctcgcaccttactgggtgcaaaagaatccacggaacttgggagaagtccagttcctgtaaaaactgggaagacgaggcgttctcatcccataggaggtttgtgagaactcacgccgggggtgaaaatgtacgtctgtagcatggagaagccttcagggtacattcagctcttaacaaacacaggaggacttaatggcagcttggcatttaatgtcaaaatccaagccgtggcatttaatgtcaaaatgacttcagaccacttctagccttctgggcccatgagtaataatgagcacactagggagcatctctgtaaacacagtggctggggaaacccttcctagtctcacttgattcctcatgacggaaatcacactaaagagagaaatcagtgaagtaaggaacgtggaaggtcatgaatgggccgcaaaccacggccagctgcttgtctttgtatggcttgccagctaacaatagtggttccatctttaaggaagaagaatgtttgatggagaaaatttgtggccaatgaagtctgaaatacttcctgtcatctgcccctttccagaaaaacttggccgacccttggtctacagcacgggttctcagtcgggcgacgatttggctgtctaggcgtcatttggcaatgtctagagacatttttggtagttagaatggggggaagatactcctgacttgtaataagaagacatcagagatgctgctaagtcggctccagcacacaggagccccccacaacgaagagttagtgcccccaaacgtcactgttgctgaggttgaaaataatcatgcagtcattcctcaattactgcctgcagcaattcctccatttttatgaatcttgtgagcacttacgctaggagaaatttcttttacaaaacttttaaaatacaattagtgctgataattcctatgtggaaatgattccagccatggtcccctcacttgagcatgtgaatattctcacggagagaagccccagcgagattttccggtgaatacgggattgcacttactctttcatcacggaaacagaccccccgagagaagccccaacgagattttccggtgaatacgggactgcacgtactctctcatcatgaaaacagagccccgttcataaatttttcatctttatttttaaggttatactcctctaaataacccttaagcctcatcaagaaaggtttgtttatagtatttttactatagcttcatccttgataacgtcctaatttccttctggacaacctccttgaccaatggcatattgagatctatgtgacatgaggatatttctcagtaccactttgttactggtacctgatgcacacggattgcgaccagagcatgatgcctccatcaagtggtaatatgtttgcagcctgctgtccagccaagagtgacagatacttctagtgacttccccggtatccactctcatcttcttccaatatcaagagaatccaggttctgtcagattagtaaggtgtgctaatctaaattttaaaaaatctcttacaggttttcttgcagctggtaccatccatgtctcacagccctggccactgacagatcagcagatgtcaccacatgggcttctgagaaagctcttgaatggggatcgttcttaaacatgaattcctccctgtatgttttgttctttgctttacttttcaccttgcaaagagatccagtacctagtattggaagatccaccttaacgaccgtgcatatgaaaaccacagtctaaggaagtgactgcagaaagctcacagcgaccctggcctcccctgtggcctctttgagtgtctgcagcagccctggacttccagacttctatcacatgagaaaaaataaaactgattattggtttaagctgctatggatatttcattgtttttcttttaaatttatttattttaagatgggggtctccctatgttgcctaggctagattcgaactcctgggctcaaacaatcttcctgcctcagtctcccaagtagctgagaatacaggcatgtgccaccacacccagcttgtttttctatttcatttgtttattggtgggagggggtttctacacccagctggatgctgcctggagcccatacacctggtcattggtcagttgtgtggtttttttttgtttttttttttttgtttgtttgttttttgagacagagtcttgctctgtcacccaggctggagtgcaatggcgcgatctcggctcactgcaagctctgcctcccaagttcatgccattctcctgcctcagcctcctgagtagctgggactacaggtgcccgccaccacacccggctaatatttttttgtatttttagtagagatggggtttcaccgtgtgagacaggatggtcttgatggcctgacctcatgatccgcccaccttggcctcccaaagtgctgggattacaggcgtgagccaccgcgcccggccatgttcagatgactgattagcctatcaaaggcattcttccgtttctttatggtggctttgatttctgatctttccttctgattctttgagtctctatttttctgctgatgatgtagggcagatgagcccccaaactgggggttagcccaggagggttcttggctttgctcaggaaagaattcaagaggcagccagcagtaaaagaaattgggtttattgaagcagcagggcacagcagagtggctgccccttgtggagcagggctgactcataggcagtatacccagggtagcagcatataggctgttggctagcagtatttatacccagttttaattacatgcaaattaaggggtgggctattcagacagcactcctcattcaccttccaccatgattgtgaggcctccccagccatgtggaactatgagtccattaaacctctttatgaattaggcagtctcaggtatgtctttattagcagtgtgagacacagttgctccggcctataaatgacacatagttttaagtctgtttcctgcagttctcctatgattggccagggttttgattctgttttgtttttttgcattttcaaattaagggtagatgattctgagggtcttgctccagctctgtctcaggcccccccaccagctatccctctttcttgcagtttacctaacagagccttggggtgggcatgtgtgggaccgtggtgctaagatttaatgctttttctcattttactcatagttatgttgcaattttggcattctctatgtcttaaaggcagtgttgaaggtatagttttgtgtagaagattcataggtgtggagttacttcacagcatttgaaaggggatttggggaggttgcttaccactcactggccattgtttttagttacctggaagtctcctcaccttagtttttggagatactttggctgaatatgttattttattttattttaatttattttttgagacagagtgtcgcccaggctggagtgcagtggcatgatctcagctcactacaacctccacctcccaggttcaaacgatcttgtgccttagccacctgagtagctgggattataggtttgcaccaccatgcctggcaaatttttgtatttttagtaaagttgaggttccatcacgttagccaggctggtcttgaactcctgacctcaggtgatctgcctgcctcagcctcccaaggtgctgggattacaggtgtgagccaccgcgcctggtctggatatgctttaaaggggtcatttctttgtcttctggcctccattgttgctgactaaaagttagcgttattcttaacattattcccctgtaagtaatgtaagtaatgtgttgcttgtcactggctcctcttcagataattatcttgggttttcaacagtttgactctgtgtcttggtgcagtttcctgtgcatttactctgcttggggatccttcagattcttagatacgtgagtcactgtctttcacaaggaagtatttggccattatttcttcataattttttaattgtggtaaaataaacataacatgaaattcactgggtttttttgtttgtttgtttttgttttttgaggcagagtctcgttctgttgcccaagctggagtccagtggtgcaatcttggctcactgcaacctccacatcctgggttcaagcaattctcctgcctcagcctcctgagtagctgggactataggtgcgcaccaccatgcccagctaatatttgtatttttagtagaaatggagtttcaccatgttggccaggatggtcttgatctcttgacctcatgatccacctgcctcggcctcccaaagtgctaggattacatgtgtgagccaccgcgcacagccccattttaatcattttttaggtgtactgttcggtggcattaagtacattgacaatattggctaccaccactatccattttcagatctttctcttcattccaaaaaattatgtacccattaagcaatcactcctcaacacttctatcttcagcccctggtaacttgtaggtagtgtccatgaattttgtcagaagtagaataataaaatacgttgttttgtgtgcgtctgccttatttcattaaaagtaatgttttcaaggcttatccatgttgtagcatgtatcagaatttcattcccttttatggcttaataaattctgttgcatgtatgtgtcacgttttattcattcatctattgatgaacatttgggctgtttctacctcttggctattgtgaatcatactgatattgatgatttttttttcttttttcttgagatgcagtcttgctctgttgcccaggctggagtgcagtggcgcgatctgggctcactgcaacctctgcctcctggattcaagcaattatcctgcctcagcctccaaagtagctgggtactcgccgagtagcctgccaccatgcccggctaatttttgtatttttagtagaaacggagttttaccatgttggtcaggctggtcttgaactcctgacctcaggtgatatgcccgcctcagcctcccaaagtgttgggattacaggtgtgagccactgcgcccagcctgaagacagcattcttagcatgaaggatgcaaagttgaggcaaaggagatctatccaaaccaacctcattacactacggcttctgagccacttctctacctgattaaccaccctagcccacacccttggttttatcccattagcgcagtttacttgtctgtccaattcagtttataagtgtttggctcttaactgcttttctggcttgtttccttatgaggaaccccatgccacataaaactttcattaaacaaatacatgtgtatgctttaatcttgttaacctaatcgtatgtcggtgtaattatcaggcccagcaaggatcctaagatgatgaaggtgaaatcttgttgcccctacaatatggacattggatgcaagtgtctgtgtgagttcctgctttcaattctcaggaattttccgaagttgttttcttcctcattttctccttttgggactccagctgcgccacaggactctgaagttcctgtttcatttttctaatgtgtttgttttccagtttgtatgacttctactgatatatcttaaagttcactaactcttctgtcctcttcatctgtggaatccatttagtgactccttaaaatccagatgtctgaggtccttaggaaaacaggtgcttctccctgttgtagcttgaatttgctctgaatgtggtggtcccctaagccaataacacaatgcctcctggcctgccctggccacccagggaggaatgaagggagaggtaggtgtagtggtaataagccttgctgtgcacagctttgtgtaataactgaaaagggtgatgtgttttcctgctcccatccccaagcctgatttcttcaagatgcagtaactgggacgggtgcagtggctcatgtctgtaatcccagcactttgggaggccaaggagggaggatcacgaggccaagagttcgagatcagcctgaccaacatagtgaaacctcatttctactaaaaatacaaaagttagccgggcgtggtggcgcgtgcctgtagtcccggctactgggaagctgaggcaggacaattgctcgaacccgggaggcagaggttgcagtgagccgagatcacaccactgcactccagcctgagcgaaagagtgagactcggtcaaaaaaaaaaacaaacatgtagtaactgacaccccccacacatgccctcccctccacctcctgttatttcattagaaaccctgccaaggaacaaggaaatcctacaaagaaggtgtctcaggtacccatcagcagccatgcagtgatgacaagtgggtctgatgccattaaaaggttgttttcaaaccaccttctgttgcaagcagaacccaattgcacaggaatccaagctccatgatggagctttggccattgtttttagttaccaggaaggaaaatggcaagattgagattaagcctggaggcccggcggggacctcatggctgtgaagaccctggactcctgtgttgctggagatagtgtttgtgctctcacatggtctgctcagccgtctttctgccattcagcacaacggaaggacctagtgtgtttccagggtgggagcctacgagtggtggactctgactttgacattcgggacagatttattccttaattttcttccttacatacttggttcatctgagggcctcagactccctctccaacagccttctaccctctcccatttccacattttcatttttgagcttccttagctaagtggttttactttcttccctttccatctctctctctctctttatatttctttctctagatttttaaaattctgtctctctcttttctccaatttctccatttccctcttttttttttttttttttttttttttttctttttctaagtcagggcctgactctgtcgcccaggccaagtgcaatggcatgatctcagctcactgcaacctccacttcccaggttcaagggattctcttgcctcaccctccaaagtagctgggattacaggcacacaccaccacacccaggtaattttttgcatttttagtagagacaaggcttcaccatgttggccagactgatctcgaactcctgaccgcaagtgatcctctcccattttggcctcccaaaatgctgggattacaggcgtgagccactgcgcctggccttacattgttattctgcacacattggccattgcgggcatcgttccttacctgagtgaacacatccatgcattcctaatatgtgtgtcctgggaaacctgggtttggagtttggagtttggagtagagaggccaagggtttgcagtcaggcaggttacttgcaaaatatttacgtatcagtcagatacattggctcatgcttgtaatcccagcagtttgggaggctgaggctgggggatcacatgaggtcaggagttggagaccagcctggacaacatggtgaaatcccgtctctactaaaagtacaaaaaaattagctgggcatggtggtgcatatctgtattcccagctacctgggaggctgaggcaggagaatcacgtgaaccagggaggcggaggttgcagtgagccgagattttgccactgcactccagccttggtgacacagcgagactgtgtctcaaaaaaaaacaaaaacaaaacaaaaaaaaattatatatatatatatatatatatatattatgtattgtgctaagtttcttctttgtaaaagcccttgggggactgttaagtgtgtgtctcagcttggatttgggtttttttagaccagagatccctggtccctttggaggtgtgagtatgagggtatttgtgtctcttgagaaggtctaagagttgccatcagtttggtggcagggtatgttgtacttagagatcttgtcagaatggataactcattttacctccatcacttacgaaatgacttttatcagctacattaaaatgctagcaatgtcatactacattctcataaatactgggaattaactaatgactttcttgtccaggtatttataggctttggcaaggcagcagtacacaaaactggtcccattcatagtaatcttgacgttaaactttggagccagagtacaagcgaataaataaacactaggaagaaaagtaaatgcggagaagaataaatgctgtgaggaagagtaaagttgaggaggggaacagacagatgggattgacccgttcaacctgtgcagtgtacagcgtatactcttttttttttgagatggagtctcgctctgtcgccaggctggactgcagtggcggcgatctcggctcactgcaacctctgcctcccgggttcaagcggttcgcctgtctcagcctcccagatagctgggactacaggcacctgccaccacgccctgctaatttttttgtattttagtagagacaggggcgtacactcatttttggccactttacctttttaggaaacaaaatcatcacagaaatcctcaagaggcagctttcctgtacatttcagtttctcctaaaacagaacagggctgggaatgcttactgaggaatcatcaaagcatttctttctgtcatgacaagagcaattccagcttgctccatgagaccctgcttctctcactgtatttggttttcaggttgcaagatttgaagaacacttgtcaaaactcgacggttatttctgttttcaaggactgtttgatctgcattttcttccagtccattcatttctatctggtttggcctccaaggtcttaatcttttgcccaagaaaacgcttacatttaagcaacatgagttccttgatttgtctgtagcccaatgctactttcttgagttcagaataaaagctgattattattattatttattgttattattattttgagacagagtcttgctctgtcacccaggctggagtgcaatggtacgatctcggttcagtgttacctctgcctcccaggctcaagcaattcttctgccttagcctcaggagtagctgaggttacaggtacccaccaccatgcctgacaaatttttgtatttttactagacagaattttgccatgttggccaggttggtcttgaactcctggcctcaagtgatctgcccacctcggcctcccaaagtgctgggattacaccagccttgggacttgacagtttttttttttttttttaagatggagtttcgcccttgttgcccaggctggagtgcactggcgcgatcttggctcaccataacctctgcctcccaggttcaagtgattctcctgcctcagccttcctgagtagctgggattacaggcatgtgccaccatgcccggctaattttgtatttttagtagagacggggggtctctccatgttggtcaggctggtctcgaactcccaacctcaggtgatccgcctgcctcggcctcccaaagtgctgggattacaggcgtgagccaccatgctgggcccttgacagttattttgacctaacattggtgataatttttctctacctcaaccaagaagatggcggattggagcacttttttcatagattgaccagtcttcccaacaacactggaggccagtcatttactttctgcagagaaagagacatgtcaaagagtcaacttaccagctggaaactgggactagtgtcaagtgcttactctgacattcagctcttgtttcacctcttgacccctttcatgcctgcatcaaccagtggatctgctgggctcagagcacatgacaaaggggcttgtggtgttccacttggcttcctgaaatcccttcctttcccctggcagtgcttccacgcaggactttgagtgtgtagtcggggcagtttacatccccaagtgaaaatgctgaacgttcagcaagccttggtcaaaagttttcctaggctcactagtgaagaaatagcaattactcactggctattgccaggattgagaaaaagaatgtgtaccctagaggccgggcccaaggggaagagagtactttctctcagcattgagtaaaatcggccattttttaaatgagccttgggaaccagcataactggtccctttgtgcccaatttctccatcccgataatgaattccatggataacctcagtggcccatgacagttgcctctcattgcacttccctgccagttctcagaaagaaagtgtcacacagtctctggagggaacttctaattacaggaacacagtctgcttgtctgagtcttgttttcagttcttggaccctctccagcagggaaaatctctgtcttgtgtaacctttgggtaacatccaatccactcaggaattcttccctgctagggaacctattgtatatacccaatgaatattagctaagtgccttacacttttaattaggttttgggaagaaagatcaataagacaaagtactgcccttaagaaagtaaaggtctaggagaagagcgatattaacagtaaataagacacctagtatggcaggtgaatccatttgggaggccccagatgaggaagatgttgaactgggggccatcaagaaaatctaagtagaagagatgatgcaagctcagtgtagaaggatgattatgattgtgattatgattatttggagatggagtctcgctctgttgcccaggctggagtgcagtggcgcgatctcagctcactgcaacttccgcctcccgggttcaagcggttctcctgcctcagcctcccgagtagcagggactacaggcacacgctgccatgcctggctaattttttgtattttagtagagacaggttttaccgtgttctcaggccagtctcaaactcctgagctcaggcaatctgcccacctcggcctcccaaagtgctaggattacaggcatgagccaccgaggcctgccttgtagaaggctcattaagagttcaggagcagaatcaaataagcatgctaatcctgagtgcaaaggcactgaaaaaatgacagtatattacattctgtagataaaagacaatctttggagtaagaggcagacttgaaaggtaatatgggacagattggagaacacacacatttcctttattctctctctttttttaaagactcggtctcattctgtcacccagattggagtgcagtggcatgaccatagctttctgcagcctcaacctcctgggtttaagccatctgccaacctcagcctcttaagtacctggactataggcacacactaccatgcctgactaattctattttttttatttttgtagagacacagtcttgttatgttgcccaggctagtctcaaactcctgggctcaagcaatcctcctgcctcagcctaccaaagtgctgggattacagtcatgagccactgtgcctggctcacacacatatatctatatgttagtctactagtttcaatgtaaatgttagttggaaatcgatggaaacaaattgatattcaatgaagtttgcagttgagcaaggtaactggttcccagttgcggaatggaatgaagggtcctgtttctatgagcttttgtttcatagccacccaaaacatggtggtttaaagcaaccaccaggccgggctcagtgtctcataatcccagcagtttgggggccaggcaggaggattacttgagtccaggagttcaagaccagcctgggcaacatggtgaacccccgtctctcaaacaacaacaccccaccaccttttatttagggtttgtttgttgacaatttgggctgtgcttagcctgagagttctcttgactggcttctgcagtcactgtctaggtggggtggggtttattgttcttcgttcaaggtctcattcctccagtcgtccaggtaaggcctgttcacacattgctggagtgttccagcagagcttgtattgggaatgcctatgccccatcagccagtgcaatcatgggtgagcccaaggtggaagggcactcagttacacaaaaggggcttggatatagggaagaaaagacacagtggccattcttttctgcagttggccacaaggccagtatattattgcaagagtctaagtaaggggaacatctttattgagaagtgatgaacatgtgggaaattcacatatttatttatttatttattttttattttttttttttttgagacagagtctcgctctgtcacccaggctggagtgcagtagcgcgatctcggctcactgcaagctccacctcctgggttcacgccattctcctgcctcagcctcccgagtagctgggactacaggcgcccaccaccacacccggctaattttttttgtattttttttagtagagacggggtttcaccatgttagccaggatggtctcgatctcctgacctcatgatccgcctgcctcggcctcccaaagtgctgggattacagacgtgagccaccgtgcccggccgaaattcacatatttaaagtatacaacctgatcaattcccttctctctgtcttatcataatactttccctggaaacttttttttttttcttgagacagagtctcaccctgttgcccaggctggagtgcagtggcacgatcatggctcactgcagcctcaacctctcaggctcaagtgattctcctgcttcagcttcctgagtagctgggactacaagacacatgccaccatgcctggctagtttttgtattatttgtagagatggggtttcgccatgctaccctggctggtatcgaactcctgagctcaagcaatcctcccatctcggcctcccaaagtgccgggattacatgcatgagccaccgtgcccggcctgattccaggtctgatagaaaaactcaaccaactgcctattggaaaaactttgaatctgcatatgacctggaagccccacttccagttgtcccacctttctggactgaaccaatgtacatctttttttttttttttttgagacggagtctcgctctattgcccagactggagtgcagtggcacatcttggctccctgcaagctccgccttctgggttcatgcccttctcctgcctcagcctcctgagtagctgggactacaggtgcccgtcaccatgcccggctaattttttgtatttttttctggtagagacggggtttcaccgtgttagccaggatggtctcgatttcctgacctcatgatccacccgcctcagcctcccaaagtgctgggattacaggcgtgagccaccgcgcctggccgaaccaatgtacatcttatacgtattgactgatgtttccctaaaatgtgtaagaccaagctgtagcctgaccactttgggggcacatgttctcagggtctcctggggttatgttatgggccattggtcactcatatttagctcagaataaatctcttcaaatattttacagactttgattcttttcaccaacatccatatgagaatttagttcatcatacagacatatcacaagtcaagtcagaaaaggcaaattatgtaaaaaaaaaaagtgcttaggaaactagaaaactagaaaatttttttttaattaaaaaattttttaaaaattcctaaataaataactgatagaaaagagaatgagggctgggtgcagtggctcacacctgtaatcccagcattttgggaggccaaggggggaggatcacctgaggtcaggagttcaataccagcctggccaacatggtgaaaacttgtctctactaaaaatataaaaattagtccagtatgctggcgtgcgcctataatcccagctacttaggaggctgaggcaggagaatcgcttgaacccaggaggcagatgttgcagtgagccgagattgtgccactgcacaccagcctggatgacagagtgagactccatctcaaaaatatatatatttttatatatttttattatatatattttatttttatatatatttattattatatatatacatatatatatatatatagcaagaattagatgccattttaatagactttatttttttagaacgtccaccaatgctgctttgattcaagtccacatgatctgtcatctgggctgtaggtagcctggcacccttcctgcccattctgcaggggaacatcattgtacacattttttttttaacacccggtgctcttacttccctccagaaggaaacctaaactccagtgtcctccatgatctgactcctgttttttgctccaactccatctcttgttccatcaccctcctgtcttctaatccatcctttgtattaagaagcaaattacctaaaccttttaaataaggcaaaaggatgaccgcattactgttcagtatcatgctgaagcattgtctgacaggcctagctagttctttccttctcaaggcaatgttcgtttgtttgcttgagacctggactctgtgaagttattgccaacccacagggaattaatcaattgcaaatgatttttgtccagtcgagttgcaaattacttcaattgcttctgttcagttaaaaagattacccctaaatggccaggcgtcatggctcatgcctgtaatcccagcactttgggaggccaaggtgggtggatcatttgaggccaggagtttgagactagcctggccaatacggtgaaaccccatctctactaaaaatacaaaaattatctgggtgtggtggcacatatgcctgtaatcacagctactacgcctcaggaggctgaggtgggagaatcacttgaacccgagaggcagaggttacagtgagctgagattgcgccgctcactccagcctgggtgacagagtgagactgcaccaaaacaaacaaatgaaaaaaaatgaaataatgtgttaataattttatattaaaaattatatttcagaaaaaatatttaccccttttttttttagacggggttcgcttttgttactcaggctggagtgcaatggtgcaatctcggctcactgcaacctccacctcttgggttcaagcaattctctcgccttagcttcccaagtagctgggattacaggcgcccacaaccacgcacagctaatttttttttttttttttttttgtatttttagcagagacagggtttcaccatgttggccaggctggtctcgaactcctgacctcaggtgatccacctaccttggcctcccaaagtgctgggattacaggcatgagccaccgtacccggccaagcacattttgttgtatatttgaagtactcgaaatttattcctgcaaaccacacagatttttgtacatttaattttaattttaaaagatctgtcagtcattgacagatgaatggataaacaaaatgtgtgtatatacatataatataatgaaatattttgtggctttaacaaagaacattctcctgagcatggtgcctcatgcctataatcccaacactttgggaggctgaggcgggaggatcactcaaggccaggaatatgagaccagcccggccaacatggtgaaaccccatctctactaaaaatacaaaaattagccggacatggtggcgcacacgtgtaatcccagctactcgggaggctgaggcaggagaatcgcttgaacctcggaggtggaagttgcattccagcctgggcgacaagagtgaggctttgtctcaaaataataatataaaaataataataataataaatagaaaaacaacaaaaaataaaaaacaaattagctaattgggagactgatgtgggaggattgcttgatctcaggtctttgggattgtaatgagctatgattgtgccactgcactccagcctaggtgacagagtaagaccctgacaaaaaagaagaaagaaaaaaaaagagagaggagagagagagagaaagaacattcggacacatatacagcatacatgaaccttggcaatatttcacttaaatgaaataagtcagtcacaaaaagacaaacagtgtatacttccgtctatgaagtaggtaccacagtcagaattatagagacagaaagtggtatggtggttcattaggggctggggagggtgaatgagggatgagtgttacgggacagagtttcagcttggggagatgagaagattctgaatatggaggatagtgatggctgctgtgaatatacttaatgccactgaatagtacacttaaaatggttaagatggtgaactgtatgttatgtatattttaccatcattttaaaaattgaaaaaaacttttttcttattgttcagttcctcccaaacttgccatcaatgaaattttccccatcactctacccagatcgctgtttctaatgttttccatgccattaaatgtgatggatattcttcagcctttattttgcttagccttatagcatcgttttacatggttgttagaaataaatcttggagtcataaagaaaaatgagcactcaaacaaaggatttctcagcaaagcaaatttacttctgcgcagaagggtgcttctcgtagggttggctgctacaagagcaccctgaacaaaggagagtagcaacttttattcttaatgcgactcttgactttgtgtgtcctttccccattggctggggtcggacagcacaatctaaactagacttgattggttacacatttaaactgtcttagataaggtgggtgtgtgatgggagacagaggagaggaggaaggggtcttctacagaggaatagacagctagtctattcttaaataaggaaagaaatgtgagctggggctatggcatatctgggcatgcagcaaaatcagaaagaagaaaaggagaagaaagtgtgtggggggggtacttggaattagagaataagaagctgagcaggctgtttgaagagaaatcttgctgtatctcgcaatggttgactctccctctcttgaaacaggacttacgacatgtccacagcctgtttaacgccctgcagccaacgcgatcacaggggattcacggaaatagttgcatctctattttcttctgtgttaccttgagacccttaggcactgggattacagagagatgggtctttgtagcttctgcgacacattccagaggggaaaacctctttatctcaaagccaaaccaatagtgatgaaagctcttccaagaataaagaggccccaagagggtgggaggtgcagagagagtcacctggcttcagagctgccttcttggaaacagaattagaacacatcatacctttctgccatttgctcttgatcccaagggagccgaatgggttggagagtagaacatcactggaacagtggatttaatgaggaaggatgagacatcagctccctggggcttgagaaaccataaatacttccctaaaacacctcacctggacagtttcctgacgccacactcatgcatcttagagaggagagttaggatgacttcatgacaagttccatctccccgcctttccctgctagattctgtcttcagcattcaacagtcaggggaggaagacgtcataccagcatttttttttttcaagcaatgtcagttgagtgactcacactatccttgttagtaccgtgtgtgaaaaggatttaaaaagtagtgtggggaggaacagagatggaggtaacagggttgataatgtctcatgatttttaaaatgtctctaggattcccttacctggttatagatgtcttaaggcattgcaacttttgggaggctgaggcaggcggatcgcttgaggccaggagtctaagacaagcctggccaacttggtgaaaccccatctcatctaaaaatacaaaaattagctgggcatggtggcggatgcctgtaatcccagctactcgggagcctgagtcaggagaatggcttgaacccgggagacagaggttgccatgagccaagatcacgccactgcactccagcctgggtgacagagtgagtgagacgctgtctcaaaaaaaaaaaaagattctattgcaactgtttctgtcacctccacctctgatggcctttcattctggaaactagtgactttctcaatgtcagtaggaactggcacttccttgagtggattcctttcagtctacctgctaacaccttcctttttcttctctagtataatataatagttctcggccgggtgcagtggctcatgcctataatcccagaactttaggaggccgaggcgggtggatcacaaggtcaagagatcgagaccatcctggccaacatggtgaaaccctgtctctactaaaaatacaaaattagccgggcatggtggtgtgtgcctgtagtcccagccatttgggaggctgaggcaggggaatttcttgaacctgggaggcagaggttgcagtgagctgagattgcaccattgcacttcagcctgggcaacaagaacaaaactccgtctaaaaaaaaaaaaatcaacaaagcaaagcaaaacaaaacaagtatgtattaaatgttcactctgcaccagatgttacatatattatcattgcaattgtgaatggactttttttcctcttattttttctcatggctgtttgcagatacataagaaagctgatgacactgattagttgtaattaattgtgtttaagttgactttttttttttttgagacagggtctttctgggctcaagcaaacctcctgccttggcctcccaagtagctaattttttaaaaatctatttttgtagaggcaagtgtctcattttgttgtctaggctggtctcaaactcctggcctcaagaatttctcctgccttagcctctcaaagtgctgggattacaggcaggagtcacagcacccagccaggctgttacattttattaaatgaattttagcttatgttaaaaccatggtttctttttctgccttgctctattcacgcatatactttgttatctgacttgccgatattaaattttttacactcttaggataaatattcattagtaatggagtgtgttattttatccaaaagataacttcatttcactcccctttcaggcttttgcatctgttgtcaacatgagattaatttgcagatttcttgtttgtcttatatgtgatttttttttttttttaccttcattcagctttccatgatgagtacaaagccttggggaatatctggataaagtaaaattttctagaatgtgatctggacttgccacaaagaaacttcaggttcgtcgggcttcatggtgtatttgtctaaatatttaagtaaaaaataatgctggctgggcacagtggttcacgcctgtaatcccagcactttaggaggctgaggcgggtggatcacctgaggtcatgagtttgagactagcctggccaacatagtgaaaccctatctctattaaaaatacaaaaattagccgggtgtggtggcgagcatctgtagtcatagctactcaggaggctgaggtgggaggatcgcttaagcccaggaagtggaggttgcagtgagctatgatcatgctactgcacttcagcctgggcaacagacccagaccctgtcaaaaaaaaaattgtttcacataactacagtgcaatgatcacaatcaggaaattggcattaataccatattatatatagtattatagatatataatacactatttgctatatactatattagtaatatagtaattagtatatagcattaatataatactataaaatttacagagctcatttatattttatttttttatttcttctcatttatattttaattatcccaataatgtcatctatagcaaaagaaagactcaagtcatccattacatttgattgatatgtcttttttgcctcctttaatctggaacatttcctagacttttttttttttttttttttttttgagatggggtcttgctctgtcaccaaggctggctgggttgcagtggtgcaatcatagctcactacagcctcaacctcctgggctcaggcaattctcctgcctcagcctcccaagtagctgggacaacaggcatgtgccaccatgcccagctaatttttgtattttttgtagagaaggggtttcactatgtttcctaggctggcctcaaactgctaaactcaaacgatactctcacagcctcacaaagtgctgggatcccaagtgtaagcctccatgcctggcatttctttgtattttatggcactgacatttttgaagagcacaagtgagatattgtgcccctcaagctcagtttgtgtgatgttccctactctttaaagttctgcgtctttggcaggaatcccacagaaatgatgtttcgctgtttccagtgaatcctatcagaaagcacatgtttattatgtcccattaagaatctccttgaccatgtaataggggtgctataaaatcagtgttaagatagatggttgggattagagagtccattttctagaattctattttgtttgggacgttataaaatggatatttaatatgggtggttaactatgagatatttcctcacgcctgttagaattgtttattattattattcttttacctatgaattggcatttttgtttatttatcagtttgtgaaaatgtccttaatttgttgaggtagcaaacaaatttcaactttgattgctatgcaaaaccagaagataatctgctttgcaatgaactttatacagttcagctgcatataggcaacatgctatatatgaaaaaaatactaactgaactacaggtattaaatactgaaatgagttaacagtttattataatttattgtatttaacaatctaggaagttcgcagccatcagcagttctagtgcaatttcaggcgcaactgggaattcgggaatctcggtggagctgttagcgtagcgaaccttgtacataaaatacatgcatactttatttatttatttatttatttattatcattattattattatttttgagacggagtctcgctctctcgcccaggctggagtgcagtgtcgcgagatctcggctcactgccagctccgcctcccgggttcacgccattctcctgcctcagcctcacgagtagctgggactataggcgcccgccaccacgcctggctaattttttttgtattgttagtagagacggggcttcactgtgttagccaggatggtctcgatctcctgacctggtgatccgccctcctcggcctcccaaagtgctgggattacaggcgtgagccaccgcgcccggccacatgcatatacttttgatagcacatgtgaagggatctctctaaaatggacctcatcggcttcgttctcagcaaattgacctgggccactcaacatggcttttatcgtgcccgatgttaatgcacgttcttttttgacaataaattcatggccatcagataatatcaatttgacatacacggcatcagggccttcacagccaccgtaggttttcttctcaccatccattttgttcttacgaaattctactttgcttccccaggaactttagtagtttctcgtcaggcccacagccagcgcagcagggtccgtgtgtactgccacagcccctattccaaggccgccccaccccgccccgccaacccagctgcctgctcccgtgggtgggttccggggcagtggaaagaattacttcagctgggtcagagccgctttctgtgactggtgggagatccgtgtaattttttattttaagacatggtctcgccctgtcacctaggctcaagttcagtgtcacaatctcagctcactgcatcctcgaacactgtggctcaaagcgatcctcccgcctcagcctcctgagtggctgggactacaggcacatgccaccatgcccagctaatttggtttatttttttgtagagagcaagtcttactgtgttgttcgggctggtcttgaactcctggcctcaagcaatcttttcatctcagcctcccaaagtgctggtattacaggcgtgagccaccatgcctgaccttagaattattaaccattactagcggttagctaacaattggctctattattagctaactattaactaactattcactattattaaaaagacaagagttggccgggcgcggtggctcacgcctgtaatcccagcactttgggaggccgaggcgggcggatcacgaggtcaggagatcgagaccatcctggctaacacggtgaaaccccgtctctactaaaagtacaaaaaattagccgggcgaggtggcgggcgcctgtagtcccagctactcgggaggctgaggcaggagaatggcgtgaaccccagggggcggagcctgcagtgagccgagattgcgccactgcactccagcctgggcgacagcaagactccgtctcaaaaaaaaaaaaaaaaaaaaaaaaaaaaaaaaaaaaaagacaagagttggcaagggtgagaagaaaagggaaccccttgtgccctgtcggtggtaatgtagattggagcagacattatgggaaatagtgtgagggttcctaaaggaattaaatagaggccgggtgtggtggcttacgcctgtaatccccagcactttgggaggccaaggcgggtggatcacttgaggccaggagttcaagaccagcctggtcaacaaggtgaaaccctgtctctactaaaaaaaagaaaaaatacaaaaaatacaaaaattagctaggcgtggtggcacatacctgtaatcccagctactcaagaggctgaggcacaagaatcgcttaaacttgggaggtggaggttgcagtgagctgagatcacgccactgcactccagcctgggcgacagagaatctgtctcaaaaaataaaaaggaaaaagaaattaaaattttgagactctttctcaaaaaataaaaataataaaatcaaaaagaagaaatttaaaataaaagaaatttaaaataaaaagaaattaaatatgatccagcaatccctcccctggatatgtatccaaagaaaatgaaattgccactcgtaaagatatctgcatgctcatgttcattgcagcattacttgcaaaagtcaagatatggaaacaacctaagtgtctgctgatggagaaatggctaaagaaaatgtgatatatatgtatatgtacatttgtgtgtgtgtatatatttgtgtatatatattccattgtgtgtatatatatgtatgtgtgtgtatatatatgtatgtgtatgtgtgtgtatatatatttttacacaatttttacaatcaatattattccactgattgataaaataggaatagatcctgccatttgccacaacatggatgaatctggaggccattatgttaagtagaataagtcagatgcagaaagaaaaatattgcattttttcacttctatgtggaatattttttttaaagtcaaatatagagaataaaacagtggttaccagaggaggggtgcggctgggggagaaaatgaagaagatgtaggataatggatataaagtagcagatatataggataaacgagtctagagatccagtgtacccatgaaaattatagtcaataacagtatgtagtattccggatttatgctacatcagtagactgtagctgttcttgctataaagaaaatgggtaactatgtaagacgatggatatgttcatttgtttcactacagtaaccattttactatctatatgtatctcataacatatatagtatacgttgaatatacagaatataattaatttttaaataattaaatatatgggtggttgagatgagagacttcattttttagaattccatttacgtatgaaagattagacaaaatgagtccataaatcacaagtaaatagtatggacaacatttctattacatgaaggatgcccgttggatgttaactgatgtttctcttaccgcttccttttaaataaataaataaatataattttaaataaatatgtatattttaaaataaatacatatatacatagttttatttttattttattttttatttttattttttgagacagttctccctctattgcccaggctggagtgcagtggtgtaaacatagctccctgcagttgcaaattcctgggctcaagtgatccttccatctcagcctcccgagtagctgggactacaggtgtccaccaccatgcctggctaatgacctcttcttttgtagatacatcagctacatggaagcaggaaaccaaacaggatttttagagtttatccttctcggactctctgaggatccagaactacagccgttcatatttgggctgttcctgtccatgtacctggtgacggtgctgggaaacctgctcatcatcctggccatcagctctgactcccacctccacacccccatgtacttcttcctctccaacctgtcctgggttgacatctgtttcagcacttgcatcgtccccaagatgctggtgaacatccagaccgagaacaaagccatctcctacatggactgcctcacacaggtctatttctccatgttttttcctattctggacacgctactcctgaccgtgatggcctatgaccggtttgtggctgtctgccaccctctgcactatatgatcatcatgaacccccacctctgtggcctcctggtttttgtcacctggctcattggtgtcatgacatccctcctccatatttctctgatgatgcatctaatcttctgtaaagattttgaaattccacattttttctgcgaactgacgtacatcctccagctggcctgctctgataccttcctgaacagcacgttgatatactttatgacgggtgtgctgggcgtttttcccctccttgggatcattttctcttattcacgaattgcttcatccataaggaagatgtcctcatctgggggaaaacaaaaagcactttccacctgtgggtctcacctctccgtcgtttctttattttatgggacaggcattggggtccacttcacttctgcggtgactcactcttcccagaaaatctccgtggcctcggtgatgtacactgtggtcacccccatgttgaaccccttcatctacagcctgaggaacaaggatgtgaagggagccctggggagtctcctcagcagggcagcctcttgtttgtgatggatcccttggccccaggactaagaagttttgtgagcaccaatggcaaaaatgttttattttgaaattcttactctttaaaattaaaaacatttttttatactttgagagtacaaatgcagatttcttaacatgcatttgcataagggtgaagtctgagcttttggcgtaccaattacctgaatagtgaacataaggcacttttttttcttttttgagacggagtctcactctgtctcccaggctggagtgcagtggagtgatctcggctcactgcaacctccgcctcccgggttcaagtgattcttctgtctcagcctcctgagtagctgagattacaggtgtgtgccacccatgccttttagtagagacggggtttcaccatcttggccaggctggtctcgaactcctgaccttgtgatccacctgccttggcctctcaaagtgctgggattacaggtgtgagccaccacgcccggccaaggcagtttttaaactctcactcccctctcaccttttgcagtctccagtgtccattattctgttataatgcccatgcgtatacattgtttagctcccaattataagtgagatcatgcagcatttgactttgtttctttactaccttacttaagagaatggcttccagtcccatcgatgttgctgcaaaagacatgatttcatccttttttatggctgagtagtactccattgtatatatcctcgatatctatatagatatagacatatgtagatacataccatgttttctttttttaaaaaaatttatttttatgtcagtagtttttggggtacatgtggtttttcattacacggatgagttctttagtggtgacttctgagtttttagtgtacccgtcacccaagtggtagtagtctcttattcctcacccccctcccaacctttctcccttcaagtcaccaaagttcattatattgttcatatccctttgtgtcctcatagcttagctcccacttataactgagaacatacgatatgttcatatggatcttatgtatgttggttgaacatacaaacaagtccaggtttttcattcctgagttacttcacctagagtaatgacctccagttccatccaagttgctacaaaagacattatttggttcctttttatggataagtagtattccatgctgtacatataccacaatctttatcactcattggttgatgggcacttaggttggttccatgcctttgtaattgctaattatgttgctataaacatgcaggtgtatgtgtctttttcacataatgactttgtttcctttgggtagatacccagtagtggaactgctggactgaaaggtagttctacttttagttcttttttttgttttttttttaagacagagtctcactctgttgcccaggctggagtgcagtggcgcgatctcatctcactgcaacctccacctcccaggttcaagcgattctcctgcctcaacctcctgagtagctgggactacaggcacctgccaccccacccagctaattcttctatttttagtagagacagggtttcaccatgttggccaggctggtcttgaactcctgacctcaggtgatacgcccacctcggcctcccaaagtgctgggattacaggtgtgagccactgtgcctggccttctagttctttaagataccactttaaaaaaagtccagtcctccattgatggacacgtaggttgattccatatctttgctaatgtgaatagtgccgtgataaacatgggggtgtaagttaacaattaatctccaagtaatttccttgatggcacttctgtcctatgtgctattcaaaaattgtgtccttgatcatcgttcttaattctccattagtgagttctgaacttgggtttgaagcatttgctatagctttgttatctcaagtggtggcacagagttcttaagctattgattgttcactgactttatttctatgtgtttgcatgtgggtttttgttgtttgtgtgttcgatcatgaacagatcaacagtgtttatttgttttcctactggatgaagtatgattaaaatacgtatttaaatatagctggttatatctctctggtgtctcttcttcttctaagaatatcagtcctattagatcagggcctgacccttatgatttcagtaaactttaattacctccctgaggaccctgtatctaaagacagtcatcatattgggggtgaggacttcactatattaattttggggggtgcaatttagtccataagagatgtttatgcagatctgagaaagtttctgccaactctatggggagctctaaagctagggctgctctttggagaattctcacattgtgtagaaataaccaggccctattaccccaggaagcgtggggccttgagggtgatagggacagagggtggagaaattctaggcagaaaagggcagttcccaggcaaaaccccaccctcaagccaaaaagcctgaaactgcagcccaaagtgagaacttatatccctgttttctcgcttggatatcaccttttcctaaaccacccctgaccctgcccaaccccatgctatgcctataaaaaccccagactcagccagtagatgaaactatggctggacattagagagaagcagctttgacctcagaaggacagctcgatggtataacttcagagaagaatttggcaggagacgactggacttcattacctgcctgccccatcccttttccagcttcccttacctgagagccactttgatcagacataagatccctcctgcatttaacatccttcaattcgttcatgcaaccttatttttcctagatgctggaaaagtgctcaggagccacaagtgcggttacaaaagcctgtcatactggccctttgccctcgctggtggagggcagccacttcatgcaaaaaggcaaagggcccactgagctgttaacacttaacaccccaccctaatcttttattatgcagatggattctctatctggccggcgccatgttgcctgtgtctttactgcacatgggctgacaaagaaaaggaaagatggagactctatgctgaacgtgtctggctttcaagtagccctttcctattggcgcagctgctaggattcacccatgcaagcttgcagttgcttatctatgtctgcagcttgatttttcaggcttctctttgtcagaaaagaaatgatttgggggttgctttttgttagggaaattcctccaaggactcttttaccctcactctctgcctaaataatttctttctatctcctttatcaatatggctgagtctggggctgttatgggctcagaatgggggagggacagaccataggtattattcaaaaaggcaacattcgattggctaaaaggcatttttcaaaaaaaaaaaaatctgttgggaaagggcaagtaaacaagaacagaagttttcactctgggtcgcaggtttcatccaggacgagtagtccagtctttcagcctatagactgtttttggcttgaaggtggggttttaccggggacccaccccatctgcctgggtatttggctgtctcctgtcactatcacagagataacaagaacacaacaaagtaaagaaccacgacattcaaatggataatttttgaggaagccatgtcagtgcatgacatgaaaatgatttaaatgatgctttagaaatctcaagaacagctgaaagtaaactgatcaaagacagagatttgatgaccatgtacagagaagaaaactataaaagtaattaatcactgaaggagttgttgaatagaaatatacaaaaacatataaagcaattttataggtgctttaggaatgggaaacagaggcatgtcttttagagagagaaaaaaagagccagaatatttaaattcacatttgccttaggtagttgtaatatccaggaaacaggaggatgttccatctaacatcactgggattacaggcgtgagccaccgcatctaagaaatattactaatcatatcacagagtgtacacacaatgtgtacacttactgtgttgttagcagtaatagcgaagagatattatgagtcatgtcacagggtgtacatccactgtgatattaacattaatattgaagagatattatgaatcatataacagggtgtacaaccagtgttatattagcagtaatatcgaagagatgttatgaatcatatcacacggtgtacacccactgtgatattagcagtaaaatcgaagagatattttgaatcatatcacatggtgtatacccattgtgatattagcagtattatcaaagagatattatgaatcatatcctaggtgtacacccactgtgatattagcagtaatttctaagagatattattaattatatcacagggtgtacacccattctgatatttgcagtaatatcaaagagatattatttgcagtaatatcaaagagatattatttgcagtaatattgaagagatattatgaataatatcccagcatgtacacacagggtgtgtacagattaagaactgcagcccatcctctttgggctgttcctgtccatgtgcctggtcatggtgctggggaaccttctcatcatcctggccgtcagctctgactcccacctccacacccccacgtactttttcctctccaacctgtccttggctgacatcggtttcccctccaccactgtccccaagatgattgtggacatccagtctcacagcagagtcatctcctatgcgggctgcctgactcagatatctctttttgctgtttttggatgcatggaagacatgcttctgagtgtgatggcttatgaccggtttgtggccatctgtcaccctctggattatccagtcatcatgaacccatgtttctgtggcttcctggttttgttgtcttttttttctcagtcttttagacttccagctgcacaattggattgccttacaaattacctgcttcaaggatgtggaaattcccagtttcttctgtgacccttctcaactcccccaccttgcctgttgtgacaccttcaccaacaacatagtcatgtatttccttgctgccatacttggttttcttcccatctcggggatcttttctcttactataaaattgtttcctccattctgaaggtttcatcatcaggtgggaagtataaagccttctccacctgtggctctcacctgtcagttgtttgcttattttatggaacagcccttggagggtacctcagttcagacatgtcctcttatcccagaaagggtgcagtggcttcagtgatgtacacagtggtcgcccccatgctgaacccgttcatctacagcctgagaaaaagggacattaaaagtgccctgcagcagctgcatggcagaatagtctaatctcatgatcttattatcggttccattctttagcatgggttggaaaaggcagcaaggtcaaatatctagacctgcaaagaatatcgcttccttcgttatgtctctagttggaattgctgagtattctgatatcctttgttcttaataaacatcatgattgaattcaatatacctagacggactcttttagtttctgggcaatgaccctggtatccaggtgaaattacattctacttctttcttctttcttctcttcttctccttctccttctccttgttcttcttcttcttctttttcttcttcttttttgagatggattctcgctcttttgcccaggctggagtgcagtggtgtgatctcagttcactacaacctctgcctcccgggttcaagcaattctcctgcctcagcctcctgagtagctgggactacaggcacccaccaccatgcttggctaatttttgcagttttagtagagacggggtttcaccatgttggctaggctggtctcaaactcctgaccttgtgatccacctgcctcagcctcccaaagtgctgggattacaggcgtgagccaccgcacctggccacatctctcttcttgtatacagttaagtcctcacataatgttgataggttcttggaaactgtgactttaagaaaatgaattataggaggtcctcaaataatgtcatttcctttaacattgtttagctataaagttgttgagaaaaagaatctggtttcattatacatcatttttcttattgttgcagtttccaaaaatctattgaagaccttaaatgagaatttactgtacttcacatttatattgcttttcactgttcatttgtaatttatttacactttgcatctataaaatctatttaggcagattatatgtgaggatccatgtcactggtcctcaagtttgagttagattgaaattgcccagagagcttacaagtgctgatgcctgggtctcattaccagagattctgatttacttagacttgtgtgggtatgaggatattacaaacatcagagagagttcagatggtaaagttcccaaagggattaaactcaatgtaagttacaaaggagttttttgtaccaccaggcaatgtgatttcttcaaatgcattgccttcaacactgaaccgactgtcattatgctgggttattttcaccccttagaatttttattttatctactgcaactgtagttttacatgtatatagatttttatcatatttccttcttgtgcatacataaaaagagaaataggaaataataacatggtaacaatatccctagacttcccattcagagactggttctttaaaaatacgtgttatttttactttctaataaagaaaatgtggtgtatgcatatacaatgagatatgattcagctgtaaaacaaatggcatcttgtcatttgcaacaactttgatgggactgtaggtcattacgttaagtgaaatagggaaggcacaaaaatgcatgttctcattcatacgtaggagctgaaaagttaatctcatgaaggcagacagtagaatattggctaccagagcatggtaaaaatggggagggggttgaagagaagttggtatatgggtccaaaggtccatgcagaagaattaaattcgagtatttaatagtacagtagagaaattttagttaacaataatgtggaatatttcaaaatagcaaggagatacgatttgtgtggttcttattatgttggtctttaacctatagtatttctgttctgatgtcattcttctgtactcatcttttgccaggttgggactctcgaaaccctgttctatttcccatgtgggttttttgtttttgttgttgtttgtttgtttttgagacggagtcccactctgttgcccaggctggagtgcagtggcatgatctcagctcactgcaacctctgtcacccgagtttaagcaattctcctgcctcggcctcccaagtagctgggataacaggcacaggctaccatgcccagctaatttttgtatttttgtagaaatggggtttaaccatgttggccaggctgatctcaaactcctgacctcaagccaaccacccaccatggcctcccaaagtgttgggattgcaggcgtgagccaccgtacccagcccatgtagttttcttatgtaattccactcctggtcactaaggctcatcacactgaaagttcagtgtacttcactaacaccttcactccccgaagcctcagagtttagaggctaccttcagttactgtttctgttactacattgtttccttttgcctttgtcctgcagtaacaattgaaccaactccctatattcaattctcttcattaaaataactagattgacttctattcctgaactttgatttgggaacaaaggtatgttgtagttctctacaattggaatatttttaaatgtgctcaagaaataaagctggttataaaacacatgtctttgtgaagggcatctaactgaggtttaaatgctggttttctacttccagttgctatgtggctctactgatgtctgaggattattgaaccaccaatttcatcataaataatttaatcatgttcttctataactttatcctaagatattaaatgtatatgtcaccaataaaagtgagctcttcatttgtcacccaatagtcaacgaacatgataagtggtacattaatattgcctgttgaaatcacattgtagacgctccccataggtgatgctctgtcctttgctctttatgtcaagatttagaagagagctatgatgaactaataccttacatggcagaagtttggatgcttcagaatagccatctaagattactatgacaatctttgatttggacggaaattacagataatggaaaaaaatgtcagatttgtagctacttcatcagccatatattggctcttgaatttgggacctttggcagctcacagctcttttctgaacctcagattcctcagtagcaaattaagtacaatcattttttttccttccaagatcatgcaatgatcatatataatggtatcatgaaccagtaaaggtagttttccatcaaatatttttagtatatattattagtatatattattacataaaagaagtcaattttatgaaaatttccagaattcataagcaaattgttattgcagaattcataagcaaactgttattgcaaactgtgtaaccttgtatgcaatacaaaacatatttctattacactagttcacctaatactgtgataatggtctatctgagaggctggctggggagatataatgaaatatatctctaattagataactatttaataggtagtaatggaacaataaggccaaactgtcataatcaatgtattattgattagtgtattgttgaacatgtgttttattttttgttttatttttgagacggagtctcgctttgtcgcccaggctggagtgcagtggcacgatcttggctcactgcaagctccgcctcccaggttcacgccattctcttgcctcagcctcccgagtagctgggactacaggcgcccaccaccgcacctggctaattttttgcatttttagtagagacagggtttcaccatgttagccaggatggtctcgatctcctgaccttgtgatctgcccacctcggcctcccaaagtgctgggattacaggcgtgagccactgcgcctggcccaacatatgggttttaagggttgaagtttgattttcaacattagctcatctaagtcatttgctgactggaccagaacatatttattagctccacatcctctaattcatcatttttaatgatgttcagcttgaggaactctaggattaaacagataatgtatttacctgataagaaattagtaaatgtagatatcattgtcatcatctacacttagatcaatgcatttcaagtaaattatttgaactcctgttgttcattatcctggatggctgacggactgtctcttttttatatttacacaagggcagagaatgaatatcattatctatatactcacaaccttgcacagtgaggacagctctccttcatataacaatgaagtaattgtacactgacttatgagagtgaaggcaatttgatatctgttcaaaccatattttctttcctcactgaagccctattcctcttatacagagaactccttggaaacaaaacgtatggtttgttagtgtttgatcagaaccgttgaatgggatctagatttcttaaacagtatttacagataaagaatcacataagacttggaaccaacccaaatgtccatcaatgatagactggattaagaaaatgtggcacatatacagcatggtactatgcagccataaaaaaggatgagttcatgtcctttgtagggacatggatgaagctggaaaccatcattctcagcaaactatcgcaagaacaaaaaaccaaacaccgcatgttctcactcataggtgggaattgaacaatgagaacacttggacacaggaaggggaaaatcacacaccggggcctgttgtggggtggggggaggggaagggatagcattaggagatgtacctaatgtaaatgatgagttaacgggtgcagcacaccaacatggcacgtgtatacatatgtaacaaacctgaacgttgtgtacatgtaccctagaatttaaagtataaaaaaaaaatcacataagaaaagaaaggttttgaaagattctgcaaataatgaaggttaatacattaaaaagtgatggtagacattcttcagttgcacattaaaaaaaaactcagaaaatagtatcctcctgtttccattaagtggactcttcatgtgaggggaaattaggaaaagatgaaagaaaatgattcattctactgcacaaacataactcttttttttttttttttttaagatagagtctcactctgtcgcctatgttggagtgcactggtgcaatcttggctcactgcaacctccgcctcccaggttcaagagattctcctgcctcagcctcctgagtagctgggactacaggtgcgcaccaccacgcctggctaatttgtgtatttttagtagagacagggtttcaccatattggccaggctggtgtcgaactcctgacctcatgatctgcccacctcagacttccaaagtgctgggattacaggcctgagccactgcgcccagccaactctttggtttttatacaaaagtacataccttgaagacattatcatcactgaagtaaataaatcacagaaggataaacacaactgggctcagtggctcacaccagtaatcccagcactttgggaggctgaggcaggcggatcacttgaggtcaagggtttgagaccagcccggcgaacatggcgaaagctcgtctctactaaaaatacaaaaattagccagatatggtggcacatgcctgtaatcccagctacttgggagaatgagacaggagaattgcttgaacttgggaggcagaggttgcaatgagccaagatcacgccactgcactccagcctgagtgacagaatgagactctgtctcaaaaaaagataaacacagtatgattccactgatatcaaatatctagagtagttaaactcatagagttggaaaacagaatggtggccccaaggagtgggcgagagagaggaatggagagtttgttgaatgggcacagtttccattttgaaagataaaaatgttctggagatgatggtggtgatggttgctaaacaatacaaatgtacttaatgtcattaaactgtaaacttaaaaatagtggaaattgtttatattgacccttctatataaaataatatatatttatactttttaatatttacacatggtatattttaccacaataaaagatgaaaattgaagcatttggatctttacaaagaaaagaaaaaagtgaataatacacacaagctttctcctgattagaggaagagcccaaaagcttctatggacactcatttttctcttcttcttcctgaattattatgaggaagtccttagagattggggaacttgggccaatttggctaatgaggagctctgtgccttgagcccccaaggccatagcatagtgaatactcagcctgtgcctccagccctgcagtgtgagcttccagtccagtgggctccacacctgtcgtctgcatcaggaggctcatgtctgaccctgtcttcctgccagtcctgaggacggagcctgagcctccatcgtgcaccacgcagggaggacagcggacctgctctccatgatcatggcccagcagaggggaagcgcagctcagtgagtgctgagggatggtcgggagccttctttcctcatcctcaggacaaacaggacagtggagtggcagataggaggacatcaatgtgcaaaatatcagctcagacaactgtggagtttatgttcttgattgtggtggggactctgaaatctcactcaaagttttactttctccctccactggttctacttgctatagacatctcactgaagctaggaaaaaataggtctctctaagctattccatgaacactgtaaaaggattatgaagctgatgatgaggatgaggaggaagaggacagtcactatgacatcatgaacttttcctgagggcttcctgaatgccaggcgcccagttctgtgttctatgtggtttgtttcattttatctgcatagccttctgcaatccataagtgcacacattattattattttgcacgaggaaaggagctgtgcatttttatgtaacttgtagtatttcatgaagtagagaggagtaaagccatgtttgaatcaggccatctaaatccttgcacatggcatttggctaggcctcttcctgcatccaacctgccctctcgaatccctgtcactctggacccctggtgtgctcactgcttaccagtgggttcctggtagaccacagctagaccagtgggtgctacgttcactgtatcaagtatagaaagggcagctgagatcacatcaaagatcccagaaagaactggcacaggatccttcagggtgcatctctcccttgcccctgttcctggctttccttgcagctctccacctcctgaaaggagaaataaaatcagagttttggcctcattcctactcaggaatctggaaacagtttgaaaatgcacctccgatgtgcctgtggttaagacctcttacctctgcttacaactttctgatagctgggaaacataaaaaaggttcatgcctgagactcagagactgatcatttattaggttggtgacaacagtaatggcaaaaacctcaattacttttgcatcaacctataatttttttaaaatcctgttattccacttatctgtgtggcagggggcaagatgttagtgtttctgagactcaacattgccacctgagttgatttctagttgacacagatacattcagtattgattaagcagatcatgggggctccctgtgggatctatttgtgatggatgcataaagtaaaggcaacgtgtattctagaaattgttattaatattttaagattaatctttatatcactcaactgaaatatcctgtgacctgaagttactgtttctgtacttcccacaggacattttatttttgtccttatataattaagtactgattattgtgacagaaacaactgagtctctttcatctctaattctccagagtctctaacctgcttgacacagaggaggcatcagaaataaaaatctcttttaagagaaatgcaggtcaggcgcattggctcatgcctgtaatcccagcactttgggaggctgaggcgggtggatcacttgaggtcaggagtttgagaccagcctggccaacatggtgaaaccccatctctactgaaaatacaaaaattagctgggcatggtggtgggcacctgtaatcccagctactcaggaggctgaggcaggagaatcacttgaacctgggagacagaggttgcagtgaactgagatcgtgcctctgcactccagcctgggtgacagagcaagactccatctcaaaaaaaaaaaaagagagagagagaaatgcaaatcgaaactacaaggagatatcatctcaccccatttagaatggcttttatcaaaaagtcaggcaatagcaaatgctcacaaggatgtggagaaaggggaacaattgcacactgttggtgggaatgcaagttagtccatccattatggagaacgagttggagtttcctcaaaatactacaaatagagctaccataagatgcagcaattccgggccaggtgcggtggctcatgcctgtattctcagcactttaggaggccaaggcgggtggatcacgaggtcaggagatcgagaccatcctggctaacatggtgaaaccctgtctctactaaaaatacaaaaaattagccgagcgtggtggcgggcgccggtagtcccagctactcggaaggctgaggaaggagaatcgcttgacctgggaggcggaggttgcagtgagccaaggtcgcgccactgcactctagcctaggcgacagagcgagattccatctcaaaacaaacaaacaaacaaaagatacagcaattccattgctaagtatatacccccccataagggaatccatatattgaagagatatctgcactcccatgtttattacagcactagtcacaatagccatgatttggaagcagctaagcattcaccatccattcaacatatgaatggacaaagaaattgtgtacatgtgcacaatagagcattatgcagccataaaaaaggaagagatcctgtcatttgcaacaacttggatggaactgggggccatcaatttaaatgaaataagccaggcacagaaagataagcttcacgcgttctcacttatttgtgggatctaaaaattaaaacaatggaaatcatggagatagagagtagaaggatgattaccagaggctgggaaggggagtgggggtgaggggaaaagtgcaggatggttaagcaacacaaaagtatagttagagacaatgaatgagatctagtattaggtgactgtaatcaacaataatttattgtacattttaaaatagctaagagtaattggattgtttggcacaaggaaaggataaatgcatgaggtgatggataccccatttaccctgatgcgattattgtaccttgtatgcctgtgtcaaaatatctcatgtcattcataaatatatacacctgctatgtacccataatattttttaaaaagaaaatgatgtataattatgtgtgtaaatgtggatataactctacagaaatactgaatgaaaaagcaagttacagagtaatacctgctctatactttcgttgacataaaatttaagaaagcaaaattaaatgattcattacttagggatatatatatatatgagtagagtataaagaaagaagagattaactcaaatttcacattggaggttacctgtgccgtagggctggggtgcctggaaccatagaaggatgcacggcttcgaagattgtgctttttttttcttgtttgtttgttttgttttgtttttgtttgtttgttttttgaaagtgagtcttgctctgtcacccaggctggagtgcagtggtgcaatcttggctcactccaacctctgcctcctgagttcaaatgattctcataccttaccctcccaagtaggtgagattacaggtgtgtgccaccacgcccggctaatctttgtatttttagtagaggcggggtttcaccatgttagccaggctggtctcgaactcctgacctcaagtgatcagcccacctcggcctcccaaaatgctgggattacaggcatgagccatcgagcctggcccaaagattgttttttgttttgttttgttttttgagatggagtctcgctgtgtcacccaggctggagtggcacgatcttggctcactgcagcctccgcctcccaggttcaagtgattctcttgcctcagcctcccgggtagctggcattacaggcaggccctactgcgcctggctagtttttgtattagagacgaagtttcaccgtgtttgtcaggctggactcaaactcctgacctcaagtgatcctgagcctcagcctcctaaagtccttcgattacaggcatgagccaccacgcccggcccaaagattggttttattgcatttgttaaactgtgggataggtacttgggtatttcattattgttcttttttttttttaagtacatacatattatgtacattcccttgatttcttggaacatttcacaaaaaaattatatacacagaataaaataaatatttaaagccaaaaatctctggaaatactgagaaaaaaagagagaaagagacagaaagaagaggggaaggtaaacattattgcttagacagaaacacattttagactttcacatctttctagcctcacataaagtaatgcaaaagtgttcttaaaattgcattactcacgcctgtaatcccagaattttgggaggccgaggcgggcagatcatgaggtcaggagttcgagatcagcctgaccaacatgaaaccccgtctctactaaaaacacaaaaaattagccgggcatggtggcacccgcctgtaatcccaactactcaggaggctgaggcaagagaatctcttgagtctaggaggcggaggttgcagtgaaccaagattacgccactgcactctagcctgggcgacagagcaagactctatctcaagaaaaaaaacacttttattaatgctcaaacatccacaggtgccttgcgcactacagacaacttgtagtcactgatggctttgattatgcgcatttaactaaaccttatttatcaaaactctgagtccacctaagcaaggacaggagttgaatattaaatgaatttcaaaagaaaacccacatatttgagggagactttgcttccacaggaaagtgaagtcagaaaccatgaagacaatgaaaacactagaacagaactggaatgtgaaaatgtctgcttatgaactgtcaactttaatttatctttgaaataacgtggtcctaggtcttacagaatatttctaaatattgtaaatcaaaggaatttgtagcattgaattagaatgaaataaggcatatttgaatgtctttggtttcttttaattacaaagatttcttttcttaaatggggaaagatatttctttactttttgtgtgtgtgtgtaagacaaggtctcactctgtcatccagactggagtgcaatggtgtgaacttggctcactgtaacctccacctctgggctcaagtgatcctcccacctcagcctcccaagtagttgagaccataggcacatgccaccacgccagctaatttttgtatttttagtagagacggggttttgccatgttgtccaggctggtctcaaactcctcagcttaagtgatcctcccgccttggcttcccaaagtgctgggatgacaggcatgagccactgcgcctagccaatatttcttattttatatttttactgaaaagagtacgctgtattttaatgtgatcatgaattttctcaaatgttcttgctcttctcactttgttcagtcaagggtctctaaggtaagtgtctacagaatcaggtgactaacacaccaatcaattacaaaaggacttgtagcaaattgggttttacggacacaaagatgggaaaaacagtggggactgcttgatgggggagggtgggggtttatggggtggaagtctatctatccagtactaagcccactaccttggtgttgggatcattgctgcaccaaacctttaccgacacattatttactcatgtaacaagcctgcatatgtattctgtgagtctaaaataaaaaaaaagaaaattagggttttcaaaactgagaaatatggctgagggtatatgatcctcaaatgtgaaaacattaattgtaaattgcttgtatccaaaatatagacacagtgctgggtgctgattttgtcctttccttttttccaattctctttttctcaattgtgtccaagatacacagagccagagaatctcacaggtgtcttagaattcctgctcctgggactcccagatgatccagaactgcagcccgtcctctttgggctgttcctgtccatgtacctggtcatggtgctggggaacctgctcatcattctggccgtcagctctgactcccatctccacagccccatgtacttcttcctctccaacctgtccttggctgacatcggttttgcctctactactgtccccaagatgattgtggacatccaggctcatagtagactcatctcttacgtgggctgcctgactcagatgtcttttttgatctttttcgcatgtatggaaagtctgctcctgattgtgatggcctatgaccggttcgtggccatctgtcaccccctgcactaccaagtcatcatgagcccacgactctgtggcttcttagttttggtgtctttttttcttagccttttggactctcagctgcacaatttgattgtgttacaacttacctgcttcaacgatgtggaaatctctaatttttttctgtgacccttcttaacttctcaagctggcctgttctgacacctccattaataacatggttgtatattttattggtgccatatttggttttctccctctcttagggatccttttctcttactataaaattgtttcctccattctgagagttctctcttcaggtgggaagtataaagccttctccacctgcagctctcacctgtcagttgtttgcttactttatggaacagcccttggagggtacctcagttcagctgtgtccctttcctccaggaagggtgcagtggcctcagtaatgtacatggtggtcacccccatgctgaaccccttcatctacagcctgagaaacagggacattcaaagtgccctgcagaggctgcacggcagaataatgtaatctccttatctgttgcatcttttttgtagtattggttggaaaaggcagagctttgatacaaaatatcaagacctttaaatccttcccccttggttacattatatttattgcttgataggttcaattcctctccatgtttcatatgtgaatgtgggcggcaagccaccaggggccgaggcaagagaccgagggcacgagctgttccagcataataaagaaaatatataaaataagaatagttatactagatatagatcatagatatgattatatatgaacatcattaatcattagtttgtagcaattactctttagtccaatattaatcttcactctacaatcataacctaggaaaaaccaggccatacagagataggagctaaagggacatggtgagaactgaccagaagacaagtgtgagccctctgttatgcccggacagggccactagagggctccatggtctagcggtaacgccagtgcctgggaaggagccccgttaccttgcggatcttggtctagcagtagggtcagtgcctagaaaaagcactccttactcagctgaccgggaaaaggagtctctcttttcccgggggagtttagagaagactctactcctccacctcttgtggagggtctgacatcagtcaggcctgcctgcagttatgcggaggcctgtttccctgtgatgctgtgcttcagcggtcacgctcctgtttcacttttatgttccaccctgtacaactggctctgccttctagacagcagtagcagaattagtgaaagtactaaaagtctccgaaatgcagaaataatggtgtaagctgtcctctctctctccgcctcggctgccaaacagggaagggccccctgtccagtggacacgtgacttgtgtgaccttacctatcattggagatggctcacactccttaccctgcccccttgtcttgtatccgaaaaataacagtgcagccaggcatttgggccactaccggtctccgcgccttggtggtggtggtccccccgggcccagctgtcttttcttctctttgtcttgtgtctttatttctacaatctcttgtctccacacacggggagaaagacccacagaccctgtagggctggtccctacatgtgaatattgtttccattgttttgtctttaattggaatgtgaaggtattctggaattctttgtttattgcaaaaattcgtggctgaatccagtatacctggacagcctcctttagtttccgagcaatgaccctggtatctaggtgaaatcacaaccctgtttttatatataagaagtccttgcttaaagtcaatagcatcttggaaactgcaaccttaaggaaatgatatacagcaggtcctcaagtaaaattgttttgttcaaagtccattagttatattgttgataaggaaaaacacacggtttcattataaatcatttcacttaaatcacagtttccaaaaacatattgagggtgttaattgaggacttactgtatttcaaatttaagttaattttcacagttcgtgtggaaattatttacatattacatctgtaaaatcactttaagcaggctatgtgtgacgaacttgttcacgagccctcaaccttggcttttattgacctcacctggggagcttacaaatgatgatggctgggctctcttacccagagattttgatttacttgaacctgtgtgggtctgagaggttttaaaagcaccagtgatagttcagacgatgaagttcttcaagggatcaagctcaaatgggtaagctactaaagagctgattgcagcactagacaatgtaattttcttcaactgtcttcttcaaattcattatccttcagcaatatacagattgtcattatgctgggaatttttagtaagcacttggaatttgttgaaaatgttgatttatatacgtatagattttcttcggatttcactcttgtgcgtactgaaagggaaaatagaaaaggataacatggtaacaacatccctaaaacttcacatgctataactgatttttaaaaatttgtttagttttctttctttttttatgaagtgtggggtaggtacacaaagttatactattcagcctttaagaaatgaaagtgagtcatttgcagcaacatggatttaagtgaaataagccaggcatgaaaagacaaatatggcatgttcccactcatacctatgagctaaaacagtgaatcttgtgaaggtacaaggtagaatggtaattactagaggctggtaagggaaggaaggagtggagcatgaaaagatgtttacagggtacaaaaatgcagttagatagaagaaataagttccagcgtttcctaatacagtaggggaattctagttagtggtaattgattgcatatttcaaagtagctaggagagaagatttgtattgttctcattattctggtttctaagccattgtctttctgttcccttcccgcctttctctactcagctctttcatgctaggttggggctcttgaagttattgctctgttttccatctggtgttcttgttacagactttcatgaacactgaattttactacactgaaattcggtatactttgcgaccaccttctagtatacccctatgcctgcctcagtgtttagaggctgctgccttcagttactgtctctgttaccacattgtgtcctttagcctttgtcctgcagtaacaatcaagccaactccctctgttcaattctcttcataataagtagattagttattcaaaataactagattagtttctatttttttttttttttgagatggagtctccctctgtcacccaggctggagtgcggtggcatgatcccgactcactgcaacctccacctcccaggttcaagcaattctcctgactcagcctcccgcgtagctaggattacaaggaccgcccaccacgcctagctaatttttgtaattttagtggagacggggttttgccatgttggccaggctcgtctggaacttccgacctcaggtgatccacctgcctcggcctcccaaagtgctgggattacaggcatgagccgcgtgcccagccctggtttctattcctgacctaaccttgactgaggaacaaaagtatgttggagttgtctgcaaggggaatattttaaaaatgtgctgatgaaataaagctgcttttaaaacatatgtctttgtgaagagagtccaactgaagtttaagtggcagtgccctatttccggttgctgtgtgactctagtgatgtctagggattgttaaatcaccagtttcatcataaataatttcagggttttcttcttttactttacactgagctaccaaaagtccatgtcaccagcaaacatgaactctcctttatttcacataaatgatagtcaaagaatttgataagtgggacattaatgctgcctttttttttttttttttttgagacagagtcttgctctgttgcccaggctggaatgcaatggcatgatcttggttcactgcaacctccgcctcctgggctcaagtgattctcctgcctcagcctcccaagtagctgggactacaggcacacaccaccatgctcagctaatttttgtatttttagtagagatggggttttgccatgttgtccaggctggtctcgaactcctgacctcaagtgagccacccacctcggcctcccaaagtgctaggactacaggcgtgaggcactgtgcctggcctaatgctgctttttgatgtcacatggtggactctccccactggtaatgctttgttgttggcacttttattttaatatttagaagagtgctatgatggattaataccttgtgatgggaaatgtttggattgtttggatggttcacagtagccaaccaaaagcgatgtgacaaacttcaatcgggatagaatatacagatggtagaaaaaatgtgggatttatggacccttcatcactcatatattgggctcttaaacgtgggacttttgataactcagaggtcctttctgaaccccatgttcctcagcagcaaattaattgcagtagtcttttcttccaaggccatgcaatgattttatatcatggtgccattaaccagtcaaatgttagtttcccttgaaatgatagcccctattattacattgaggaagttaattttagggcctggcatggtggctcatacctgtaatcccagcactttgggaggctgatttggcaggaaagtttaaggcaggtgtttgagaccagacttggctacatagtgagaccctgtcactacatttttaaaaaatttaaaagaagttaattttaaatgggtattctcagaatatacaagtaactggatattacaaactgtgaccttgagtataaaacaaaacatttctttttttttttttttttaaagacagagtctcgctctgttgcccaggctggagtgcagtggcacaatctcatctcactgcaacctctgcctcccgggttcaagcaattctcctgcctcagcctcttgggtagctgggactgcaggtgtgtgccaccatgcccagctaatttttgcatttttattagagacagggtttcatcatattggtcaggctaatctcgaactcttgaccttgtgatccgcctgcctcagtctcccaaagtgctgggattacaggcgtgagccaccacacccaggtaaaacaaaacatatttctattgaacaagttcatctgtagagatgtgataacaactaagagtctgtttgaggagacatatcaaatgtactgattagaacactatttttgctactacccaaacattttaaaagctcccaactcccagcatcttccgatccaatctacctctacattcctgtcattttatcatttgtgccctcatatttacctcagtatttattgatacactgataaatagcatcctttcttccacattcaacttgttggaatatatatttacatttattatatcagtcattgacaaatattgttgagtacctcacctctgagccatgggtggaatgtgaaagtttataaagaaccataatatctggctgggcatggtggtctgtacctacaatctcaccactttgggaggctgaagcaggagggtcacttgagaccagaagttcaagaccagcctgggcaacatagcaagactccatctctacaaaaaaataaaataaaataaattacctggacatggtggcgcaggaggattacttgaggccaggaattcaaggctgcagtgagctatgactgagccgcttcactgcagcttgggcaacagagcaagacatctcaaaacaaaacaaaacaaaaactccataacttccatacaacctattttatctacttgaataaagacaggccaaaagaaagtacatttcattaaagaatttactaggtgatctcacacacacacacacacacacaacacacacaacacagagtctacactagggagttctccgcctgaagtgagatgagctctttcttgatgagcaacaatcagaagctgctgggaacacttgctgaatttaggtgcagaattgcagcagcttattgtgatgttgggctgagagcttgtggcgaaggagaaccagggtggcttattttgtctgaaggtccaggagaacattgttaagtctgtagaaatatccagtgcagaggaaagggcgacatgtccatgtgccagttctacagcatggaatttttctgacagtacaatgtcttgaatggtgaggaactctaccggaaggcagagggaaatctccatggtcttgggtgcttagagacccatgtcctggtagaaggataggcctggcctctgttgctctgtcccttgcttccctgcactgacagaactcagctggcatatgtgagctgccccatgagagtcccttgtggcaacaaactgaggggccttaggccattgtcctgcaagaacctaaaccctacaaacagccatgtgagtgagcttcacagcagatcctctccagtcagtccacgagatgactgcaaccctggctgacatctgattgcagtcttgttagatatggggaaatgcttaagcaatatataaagttaccaagttaggctgcaaagatcagcagtttctaacatgccaacatagatcaatcagacagaaagaattagggtcttatccaacttagcaaaaacataaattaccaatgcataaaatctcaaattacaggcaaggagtatagaaagtaaaatagaaagtcctccttagaaacataaatctgaacttcaagaatgaaagtagtggctgggtgtggtgggtcatgcctgtaatcccagcactttgggaggccgaggcgggtggatcacgaggtcaggagtttgagaccagcctggccagcatggtgaaaccccatctctactaaaaatacaaaagattagccgggcatggtggcgtgcgcctgtaatcccagcgccactgtgctctagcctgggcgacagagcaagactccatctcaaaaaaaaaaaaaaaaaaaaaaaggtgcaacatattcttctcatggaaggcctgcttcttctttatttacatggttcattcaatggatttgcagatatgactcccatttcattttaaaattaaaaaaaaatctgatgtggtttgtcactgtctctgaaacttggtggtgggaactcagaggacagaagaggttttaatgagaagaggaagccctgttccttcaatggtcattcacttttctcctcttctacttttatttttctttaaaaatgttttaaaacatttttaatttttgtgcgtagatagtagctgtatatatttatggggtagatgaaacgttttgatacaggaatgcaatgtgaaataaccacatcgtggagaatgaggtattcatccctcaactatttatctttagagttacaaacaatgcaattatactttctaagttattttgttttatttatttattttgttttatgttttagacagagtcttgctctgtcgcccaggctggagtgcagtggcacaatctcagctcactgcaacctctgccacctgagttttatttcaaagacaaatatttattgcaggtatttgaataaacagaaaatactggctaccaaatttgcaggatgcaaattaggattagtatgcattccaaatcagtgaaaaatgataatatcttttgataccatcaaaatgataatatctttatgatatagaatacaatggcccggaaatcaagagttggaacaagattggccctgcctaacatcacctgtagtgagacacctaaggggtttgtgctcccagattccacggctctgatttctgtgggcttatagggcttgtatttcaaagggatagcatgtcagactcattctggccagtatattactaggaaccatttgacccaaccagctttcaaatatagagtcataatttgaagttgaaaatcacattatcattctttgcttttgtgtttgtttttggtttgagacagggtcttgctctgtcacccaggctggattgcagtgccacgatcacagctcactacagcctcaaactcctaggctccagtgattctcctgcctcagccctccaagtagctgggaagacaggtgtgagccactgtgccccgaaaattttatatcactgtttttatggaaagtaggatggcaaagttagaagtgtgggcaaagtgtcagattgttaggatatactctacctccatctcagtctcctcctttgagaaatgcagtgaatgagacaaaatttctcacgaaatgttttcaggattgaataacatcagacatgtaaagcaacaagcactgtcctgatattgtaaacattttatacgactaatctatggttttcattttatttcctatccagaggacaagaaaaaactatactaaggtgaggaacatcaacattcaacaggataatttttgaggaaaccaggtcagcacttgatattgggagtgccatacacatcaaattagaagtctcagaaagagtggtaagaaaactgatcaaagatggaactttatgggaaacatctagggaagaaaagtcaaaaagggcttacagagggagtttttaggagaaactaacacaaaaacaaaagcaaaatcatagttgtttttgattaaaaaaaaaaagaaaagaaagaaacacattggccaggcacggtggctcacgcttgtaatcctagcactttgggaggctgaggcaggcagatcatgaggtcaggagttccagaccagcctgaacagtatggtggaaccctgtctctactaaaaatacaaaaattagctggctgtggtggcacacacctgtaatctcagctacttgagaggctgaggcaggagaaccgcttcaacctgggaggtagaggttgcagtgagccaagattgcaccactgcactctagcctgggcgacagagccagactctgtctcaaaaacaataacaataacaacaacaaacaacccaataacaacaaccaaaaatcccacatcaagcacattttttaaaagagaaaaagagccggatatttaaacccacaacatttgccttaggggtacgcagtgtgtcctcttagttctgaggccctgatttgtcatggacaagagtcggccctgctgaggagtctttccagggcccccttcacatccttgttcctcaggctgtagatgaaggggttcagcatgggggtgaccatggcgtacatcactgaggcggtggagctgctctgggaagaatgggtcacagcagaactcagatagaccccaagtcctgttccatagaacaaggagaccacacagaggtgagatccacaggtggaaaaggctttgtacttgcccttggtggaggacattcccattaaggaggagacaatctgagagtaggagaagaggatcccagctacaggaaacacacccagcagtgccgtggccacatacaagacaatgttattgaggagggtgttagagcaggccaccttgaggacctgagccggttcacagaagaaatgcggaatctcagtgcctgtggagaaggtcaacctcttcatcagtagaatatgaaccagggagaaccagaaaatgatgaaccaagatgccagaaccaggaggccacagaggcaggggttcatgatgaccgtgtagtgcagtgggtggcagatggccacaaaccggtcataggccatcacggccagtaggaaagtatccattccagcaaacatcattaaaaaatacacctgagtgaggcaccccatgtaggagatgtctttgctccgtgcctggatgctcactagcatcttggggactgtggtggagatgaaacagatgtcaacaaaggacaggttggagaggaagaagtacatgggggtgtggaggtgggagtcagagctgacggccagaatgatgagcaggttccccagcaccgtgaccaggtacatggacaggaacagcccaaagaggacgggctgcagttcaggatcatctgagagtcccaggaggagaaattttgataattctgtaaggttttctgcttccatgtagctgttgtgtctgctggggaaggaggaaaaagcaacgtttaatgaacagcaagtggcagctcagcttgtcatcactttacaatatcaccttttgatggacatttgtcacccttcctggagtccttacaaagacaatgaatctctcaggaagtggtatctatttttattctatttgtgtagagttatccagccattctttaatttttagaaatctctctctttggccgggcatggtggctcacgcctgtaatcccagcactttgggaggacaaggtgggcagatcacgaggtcaagagattgagaccatcctggccaatatggtgaaaccctgtctctactaaaaatacaaaaatcagctgggcgttgtggagtgcacctgtaatcccagttactaaggaggctgaggcaggagaatcgcttgaacccaggaggcggaggttgcagtgagccaagatcatggcactgcactccagcctggtgacaaagtgagactccgtctcaaaaaaaaaaaaaaaaaaaaaaaacctctttttttcatttactcaccagttttaattcccccatttgtatctatgaacttaaatcaatttcttctttggtgtgaatcttccaaaataattaaaggtatgtcatgtcttttcctcgataatccccatgcttccttcattctaatagatgtacaatagttattaagttgtggattttcaacccaaacaacctttattctgtgacccagtgcttggaagtgatgtgacagttaactctcagggctttcttccttccttaaaattaaattattgatattactttcttattgaggtttaaaaatgccatatgcacggtaggaatatcaacaaatgatagctatcattactgctactattactattaatcttattaatcttttccttttatgataattacttagatatataactcttccaaggtatagcatagagctgtgatttggaaaatattttctgaaatcagactttttagaataaaattctgatccatgcattagtctgttttcactctgctgataaagacatacctgagactgggcaatttacaacagaaagatgtttaatggacttacagttccacgtggctggggaagccttataatcacggtggaaggcaaggaggagcaagtcacatcttacatggatggtggcaggcaaagagagaaagcttgtgcaaggaaactcccccttatagaaccataagatctcatgagacttactcactatctcaagaacagcatgggaaagacctgtctccatgattcaatttcctcccactgggtccctcccattacacatgggaattcaagatgagatctgccaccccctgcaccccacagtcatcatgaactcctgcctctgtggcctccttgttctggcatcttgatttatcattttctgggtctccctggttcatgttcttctgatgaagaggttgaccttctctataggcactgaaattccacatttcttctgtgacctgcctctggttcactgtgtagggacacagccaaactatgtgaatccaccaacttactactgtataccatagagaaagttatttgaactgtcttagctgcagctacctcacctccatagtaggagtagtaaatactccctatgtgggaatattgaagagtgaaattaaatgagattatccatgtcatttgtctactatgatttctgtgtcatacaatggatatttcacacatatgaacttttgttcttttgcttttttttttgagacagagtctcactctgttgaccaggctggagtgcagtggtgcaatgttggctcactgcaacctctgcctcctgggttcaagtgattcttgtgcctcagcctcccaagtagctgggaccacaggcatgcaccaccatgcccagctaatttttctatttttagtagagatggggtttcaccatgttggccaggttggttttgaactcctgggctcaagtgatccacccaccttggcctcccaatgtgctgagattacaggcatgagccactgtgcccagcctgaacttttgtttttaacattacaataaatctgtctttcatggctatcatttatcaatatcaatatcccccttacatggggcagccatcaaggatggaattctgatcactgtgaatacaacaggtctgttacgtcttgtgaccaccacacaggactctcaactcatgaagatccctatgcttccctgcttcagagaatgtctgcccagtgtattcctccaagaagtaacaaaagcctgtggactacatacacaagatgagaaaagaaagggacaccgccattagaatcaaagacaaggcctgagagaatgtgtgcttgtgtacacatgcagttgagtgggaatgttggactaatatcagggcaatgaattgccaagaaatgtgactgataagtttgatataaaaatttaaaaatttctataaatcaaatcatcctaaaaaactaaagggcaactttgaggtttgaaaaaaaatttgcatttttcatgatggaaaaaaggttgttactatttatgcctagagaatgttgattaattaaagatggaaaaataatcactgaagaccaactttagtcctggaaagtggatagaagaggcttctctgagataggaaaatttgggctgagagaggaagaatggatcattggtttgtttgtttgtttgtttggagatggaatctcgatctgttgcccaggctggagtatagtggtgctatctctgttcactgcaacctctgcctcccaggttcaagcgattctcctgtctcagcctcctgagtagctgggattacaggtgtgtgccactacgctcagctaatttttttatttttagtagagacagggtttcaccttgttagccaggctggtctcgaactactgacctcaagtgatctgcccacctcggcctcccaaaatgctgggattacagacatgagctactgcacctggccggatcattgttaattaggggaagtaaggaaaggaaagggtaaatcttctaggctgacagaagagaattcgagattgtcccatgggtcattgagcttgtaaaggaagggatttgagatgccagtgagatggggagcagggaatgaaagcgggatatgtatttgatgactagaaatagaacatcctatattcttcctccttgtccctttcacattggtcaacttatatttagttttagacagtggttgcgattgttttgtctcatcatttaacaaggatttacgtggtgcccagcacattactgattctgagcaagtacaaattgaaatgttctataaagactgggaccaaagcatcaactataacacaaaatagaaatcttcaagtttaagacatgtttgaatatagacataaatttaataatacagtaaataacatattcatatctcttttaaaataatgataaatgaagtagtaataccagctctaacaatggaagcaggtttaatgtaagaatgtctgcataattcatcacaaaaacaggtcagtaaagagaaatcataaacaaaatcacaatagaaaaaatgcatttgaaaaagattatcaaccagggcagatcctctcaataaaggaagaaaccaaggacaattgcttaacccgataaacaatggttgttttaataccacaggcaacaagatatgctatgttaaaacagtaaggggtttaaattcctggatacaccaaaggccgtctactacaatttcaatcttttgatattttggtgaacatgcaaatggatttttttttgggggggacatggtgtcactttgtcacctgggctggagtgcggggtgcagtctcagcttactgcaacctctgcctcctgggttcaagcaattatcccatctcagtctcccgagtaactgggattgcaggtgtaagctaaggtgtcaggctttctttttttgttattgtttagtagagacagggttttgccatgttagccaggctggtctcagggtcctggcctcaagtgatctgcccgcctcggcctcccaaagtgctgggattatagatgtgagccactacgttcagccaagggatttttaatatgagaaaaaaaattggactgcatgttgaatgtcagaaataattgtattatttctatatgatatcatggatactaagttgaaatagcaaaaacataacagctagtaagtgctgtaaataagtcaccatctccaccacatcaaccctacccccaatccccagaccactctgggtctggtaaccaataatctgccaggaaaaatatagaatataatagaaaaatccaatcacattaggaacacatagacaataccttgagcatagtagatcttccgtgagtagttaatgaataagtaactggatgtacgaaattcaacaggagactaaagtttataggaaagagtgcaggagagttagagactgttcggaaaataacttattaaagacgggccctggattccaaggagtgagaacagaaggtgggagacactggtttctgtgaaaactaaagtaccatcaaagtacagggacttcaccttcatagactcaataagtatgggactttccaggctcattactgtgaaggctagtacttattctctctcctcttttccttcttaccccaccagccctcactgggtcacactaactctgatggttatcactgaagttttctcttctacacgatctgttcctaggaagccgtactgggttttttccaaaggctgggagcagagaattacaggtgaggttgtttaaacaggggcacattttaagtttccagtgtctcaagagttgaattctcagagcaccttattaaataaattgttctattttcttcccactctccaaagagtttggctccctttgagtagtaagaagatgatagaatggaaatttttcagttaattttgtgatgaaataggcagtggtagggcatgatggatttatttcccccaagaagaaattctttcttcggtttaatttgaaagtcacaagttttgccctaaggaaagattaatttctgcaaggaactaaactcaggaatcatctccaagcgatgtgactcccttgaagagtctttggagattttatggatccctcggtgttgaaaattcatggaaacaaaaatgtcttttctttttaaatattttttcaaattatttttatatatttttttaaattatagaattatatgtatgtatcatgtacaacttgatatttggaaatatatatacattgtggacattcaatgtatctaattaacatacgcattatctcacagagtcgttatcctggtgagaacacttaatatccactctcttagcattttcaaagaatatcatatatatcatcattaactaaagtcatcctgctgtacaatagatctcttgaacttacttctcttatatagctgtaattttgtattcttttactaacatctccacaacaccaacactactcctcaaccccaaaccactctgggtctggtaaccaacattctacttctttgaaatctggattctatttctctgagatcaccttcgttagattccacatatgagtgagatcatgtgatatttgtctttctgtgcctcccttatttcacttaacacaatgttctctgagttcatccatgttgcaaatgacaggatttccttgtgttttatggatgaatcatattccattgtgtatatatactacattttctttatccattcatttatttgcagacaactaggttgattctgtgtcttggctactgtgaataatgctccaataaacatgggagtgcgatatcccttccacacactgacttcgtttcttattgatatatacccagtagtggactgctggatcatatggtagttctatttttaagtttttgaggaacctccatactcttttccataatggttgtactaatttacattcctaccaacagtgtagaagggtttccatttcttcatatcctggccagcacttactatcttttgtctttttagtaatagccatttgagatgaagtgaggtgatatctcattgtggttttcatttgcatttccctgatgattagtgaagttaaaccttttaaaaatgtatgttgggccgggcgcagtggctcacgcctgtaatcccagcactttgggaggcctagacgggcggatcacagggtcaggcgatcgagaccatcctggctaaaggtgaaaccccgtccctactaaaaatacaaaaaattagccgggcgtggtggcgggcgcctgtagtcccagctacttgggaggctgaggcaggagaatgacttcaacccgggagggggagcttgcagtgagccgagatcgcgccactgcactccagcctgggtgacagagcgagactcgtctcaagaaaaaaaaaatgtatgttgtccatctgtgtgtcttcttttgacaaatgtctttcaggtcttttgcccttttttttttttttttttttttttttttgagacggagtctcgctctgtcacccaggctggaatgcagtggcgcgatctccgctcgctgcaagctccgcctcccgggtttacgccattctcctgcctcagcctcccgagtagctgggattacaggcgcctgccacgacgcccggctacttttttgtatttttagtagagacggggttatcaccgtgttagccagggtggtctcgatctcctgaccccgtgatccgctctcctctgcctctcaaagtgctgggattacaggcgtgagccaccgcgccaggctgtcttttgcccattttaaaattgggtcgttttcttcctactgagttgtttgagcttcttacgtattttggatattagccccatatcacatgtctagtttgcaaatattttcctccattctgtagtttgtctcttcactctactgtttcctttgctgtgtggagatttttagtttaatgtaattccatttgtctattgcttttgttgtctgtgcttcagaggtcatatccaaaaaaatcactgctcagaccactatcatgaggttttcctcttttgttattttctagcttttctattttaggttttacatttaagactttaatccattttgaatggattttcgtatatagtgtgaagtaaatacctaatttcattcttctctgcctggatatccagttttcccaacaccatttattaaagagactgtcctttcccccttgtgagtctttggcacctttgttgaaaatcagttggctataaatacatggatttatttctgtggttgatattttgttcagttggtctatgtatctagttttatgccagcaccatgctgttttggatattacagctttgtcaaatagttttaaatcaggtagtgtgatgcctccagctttgttattttggctcacattgctttagctatttggtgtctttagtgattccacaaaaattatttctgtgaaaaatgtttttacaattttgacagggtttgcattaaatctgtagattgctttggatagtatggacattttaatatagcaattcttccagttcatgaacatgggatatctttccatttatttgtatcttctttaatttctttcaacaatgttttatagttctgggtgtacaaatttttcacctcctcagttaaatttattcctaagcattctatttttgggggtaccaattataaataggattattttgttgatttcttttttgagtagtttgctgttagtatatagaaacactattgatttttatatgtcgattatgtatcctccaactttactgagtcttttttgttagttctaacagtttttggcagtcttcagagttttctatacataaggtcatgtcatctgcaaacagggaaaacttaacttcttactttccagtttggatgtcttttattttttttctctaacctaattgatttagctagaacttccactactatattgagtagaagtggtgagaacaggcattcctttcttgttctggaccctagataaaatgttttcaattgttccccattgagtgtgatgttagctgtgggtttcttgtgtgtggtttttactatgttgaggtatattccttctatatctaactcattgagtctttatcattaaaggatgttaatttttgtcaaatgtttttttctgcatctatagaaatggtcatatggcttttgttcttcattctgtgagtttgatgtttcttgttgtttaatttgcataatttgcaccatccttgtgaggataaactgctggtcttttcaagatagaaggagccccatgtggtcaacctgctcccctggctggctggtctcctcaagaaagaaggccctctgggtgttctgctattgtctcttgctgaccattcggacattccgaagcagcaccagctcaatggatctttgcaaatgggaggatcagcccttgtggccactctgtttatcaggccatcataccatcaggtggccaatgataaaggctggaaaatgttatgtggcaaaatgaatgcctatctgcctcctatgtgacatacaacacaaatattttcatttatcatatccagtcctctatgtccatctacatacctgtctacactgtttcatcattttctttcaaagcccatgaccaggtggtcccaccacctcaaatgactttttcttccagacaacgtggatgaccagatgtgccgcttgcagttccaccctttgcagagattttttctatacacccctttttcagggtgtccctgaacttggctataatgaagccatggctcattttttattgtactcacataccaagccaatctgtctataaagcaaactcaggcatttttctcttcttttttttttttttttttaatagtacaggacatctcctgctccccaatggaccctaggtacaagctaaaggcgtggtgttggtgcgataatggtgaatgccattgggatctgctggagtcttggctttttttttcagactgaatcttgctctgtggcatagactggagtgcagtggcacaatctcggctcactgcaacctctgcctcctgggttcaagcaattatcgtgcctccgcctcccgattagctgggataacaggtgtgtgccaccacacccagctaattttttgtatttttaatagagacagggtttcaccatgttagccaggatggtctcgatctcctgacctcgtgatccacctgcctcagcctcccaaagtgctgggattacaggtgtgagccactgcacccagccggggtctcggctttctacacgtgcagctttctcatgcctctggtcctgtttgggttcattctcagatgtgccatttccaccatggattggggctgggcctgtctaatgttacgacttagtagggcccatagaatcaggttatagtgggaaatttcatatatgtggtcattggtaccccgtcatcaagcatcccatatctacaggacttggtaacaaaccaggaactatttctcaaagacatataaatatttccagtggatggcatagcctcattctagaatccttaaaacctgatcatgattttcccactaagagattccatatggccaggcatggtggctcacacctgtaatcccagcactttgggaggctgaggccagtggatcacttgagcccaggagttcaagaccagcatggccaacaaggtgaaaccctgtctctactaaaaaataaaaaatacaaaaaattaactgagcatggtggtgcaagcctgtaatcctagctacttgggaggctgaggcaggagaatcacttgaactggggaggtggaggttgcagtgagccagaatcgtgccactgcacttcagcctgggcaatggagtgagacttggtcaaaacaaaaaaaaaaaagagagagagattccatagatgcactctgaattttgttcaccaatgaccttcaacaccatagatctagcagataatatggcccaagcataggggtgtatgatgtgagaagaggagattatgttggtatgtgggtgatccatttaaacacttatcagtagactttctctcaattttcacaatcaatggtcaaatgcaacagacatgacctgaaaaagaaatgacaaccaggacttggaatgcttagggatgaaggtcaaggtcaccccaccacctgaatcacccaacaacagaagtgttatacaaggagaggggaggtcgggtgcggtggcccatgtctgtaatcccagcacattgggagactgaggtgggcagatcacctgaggtcaggagttcaagaccagcctgaccaacatggggaaaccccatctctactaaaaaaaattagccagatgtgatggcacatgcctgtaatcccagctactcgggaggctgaggcaagagaactgcttgaacctgggaggcagaggttgcagtgagccaagatcacaccactgttctccagcctgggcaacaagagcgaaactcaagaaggaaagaaggaaggaaggaaggaggggaaggaagggaaggaggggaaggaagggaaggaagcgaaggaagaaagaaaagagagggagggagggagggaaggaaggaaggaaagaaggaaggaaggaataaaaaaacaacaaaaaggagaggggaattgaggatggtgacaagggagggggacactacctatatcagtgggaccttgagatgacaggcagcagcagaggctgctgtttgaaccactgaccctccttttgtaagtatttcatcctattggcctctcttccctaaaacgacacaaaggaaaccatggggaatgccactccttgaatgtacacaaaaagtttatccaaatggctgaaggagtggatggtcatggatgctgcgttgcattccttacttatccatttcagaatgaaggtcctgttcttcagggcataaggagtgtagccatatggcagcctgcagcctcaatccccttagagagttgctctcagctgaaggaggctgctttattcatggtggaaacactcatctctcttgctgtaggagcataactgacccagagccatctgtattcattactatgtttgtgccaagcttgctcctgggctgctcccatcacggctagaacacagcaaggcacctgtgcatgctccttcctgtgtccacaatgacattgatgacctgggtcaattactcctgccaggtgggagctcctctccttggcatgagagccctgaagtgctaggcagcagcatggcttgaagttcttagagacttctgccctttctctagaagggctaagccttgtttgaaatgcttgttccctggtaccataaagaaatagcacttgaatataaatttaatttcctcagccaggccatttttatactttctgcagaaagggtacactcgccagcagttttgccacgagagtatactgaacaaaggagacaaggtcatttataacctgatgtgtccaccctactgctgggtccggtttccactggctggaacgggaccgcacattccgtgtttgtcctgattggctagcaacttagaactttttaaaagaggcaaaggcagaggagaacaaaggaaggagaaagtaacttgtggaatgttgagaaaggtaaaaacaccttcaaataaggaagaggaacaggctatgacctaatgcttgcttggaccagtataagcatgccagggcaaatatttaggctaaattgtgagagctaaaaacataaagtacattgatttctttattacggctagcagatatttaagaatgttagcacaggtctttgaataaattttgcttctaagggaagttactatttattcccaattagacaaggaggaaagtctttgaagaggaacctctacttacttttacagcctttagaagccaagacctctaaatctgcagaagtcagacttgagaacagaagcacaaagtccccaagtggctccctgagaggaacatcaggcagggacccttctactttccacccttgattttttttaactttatcttaagctcaggggtacaagtgcaggtttgtcacataggtaaactgggtcataggggtttgttgtacagattatttgatcacctggctattaagcctagtacccattagttatttttcctgatcctcttactcctcccaccctccatcctctgaaaggcctcagtgtgtgtagttcccctctctgtgtccatgtgttcccatcatttagctttcacctataagtgagaacatgcggtatttgcttttctgttcctgcattactttgctaaggataatggcctccagctccatccatgtccctacaaaggacattgatctcattctttctcttttttttttttttccagagtcctgctctgtcaccaggtgggagtgcagtggcacgatctcggctcactgcaacctctgcctcctgggttcaagctattctcctgcctcagcctccggaggaactgggactacaggcatgagccaccaagctcagctaatttttgtatttttagtagagacggggtttcgccacgttggccaggctggtctcaatttcttgacctcgtgatccacacgccttgggctcccaaagtgctgggattacagacttgagccgccatgcctgcctgatatcattcttttttatggctgcatagtattccatggtgtatatgtaccacattttctttatccagtctatcactgatggacatttaggttggttctatacctttgctattgtaaatattgctgcagtgaacatatacatccatgtgtctttatatactaatgatatatattcctctgggtatatacccagtaatgggattgctgggtagaatggtatttcttttttttttttttttttttttgagacggagtctcgctctgtcgcccaggctggagtgcagtggcgggatctcggctcactgcaagctccgcctcccgggttcatgccattctcctgcctcagcctcccaagtagctgggactacaggcgcccgccactacgcccggctaattttttgtatttttagtagagacggggtttcaccgttttagccgggatggtctcgatctcctgacctcgtgatccgcccgcctcggcctcccaaagtgctgggattacaggcgtgagccacagcgcccggccagaatggtatttctgtctttaggtctgtgaggaatcatcacactgtcttccataacgaatgaactaatttatacctccaccgacagtgtataagcattcctttttctccacaacctcaccagcatctgttattttttgactttttaataatagccattctcactgtccacccttgagttttggacccatggattttatatattggggatgtagcacattatgatttttctttgtcttatggtgtatattacatcctgccaattttgtagtcagtatctgtgtattcaaatacctacattaattattttcattctctttgaaattaaacacattcccctattgtccagttaaaaacatttttcaaaatactctcccatactccatgcccccgttaggctacactttctctcttctctccgcttccctaaaaacttcatagttggtgtacatttgccacctatatttcctctagacacactcttcacctactccatatgggctattactgtcctacccttctatttagaggtaataaatgaagcccttcctaaaatcaacaaaggcttccatgtcaccagaaaatgtcaaaaactattgttcagtcctcattttgttggttctttcaccaggacaaaacctactcaccaatttgctttccttcaggaaggactactttggagtagatggtgaatgccagggactgaaaaggggagaaaatggggagatgctggttaaaccacaaagggttctagtgatgcaagattaataagttgtggatatgtcctatacaatacagtgcttgtagatatcaataatgtattatttagaaaaatgtgcttaaaggcagacgttatgttatgtgtggttatcacacattaaaatattaaagccagttgaaactttaagaggtgatgggtatgtccctcgccgtaatggtggtgatggtttcaaggatgtatgcctgtttcaaaactcatcatgtgtatacattaaatgtctacagcttttacattttaatcatacttcaataaagtggttaaaacataaggaaagtaaatttaaaaaaaagatccctttgcctctataaccttgtggacaccaagggatccataaaatctccaaagtttcttcaagggaggcacattccagagagaagattgctgagttttggttccttatagaaattaaactttcctgccagggatggtggctcatgcctgtaattccagcactttgggaggctgaggcgggtggatcaccggaggtcaggagttcgagaccagcctggccaatatggtgaaaccccatctctactaaaaaaaaactacaaaaattagccgggcgtggtggcaggtgcctgtaatcccagctactcaggagactgaggcaggagaatcacttgaacctgggaggcagaggttgcagtgagccaagatcacaccactgcactccagcctgggcgacagagcaagattctgtctcaaaaaaaaaaagaaagaaagaaaagaaaaaaagaaattaaactttccttagggaataccttgtgacttttaaatccaactaaagaaagagtttctccttggagaaaataaattcatctcccactaccgctgcaaaattgcctgaacattttccattctgctatcttctttgtatcctaagggagctgaattatttggagggtggaaaaacaatagaacaatttatttaatgaggctctctgagagttcaacccttgaggcaatggaaacttcgaactgggccctgccacccctcaagtgtaattctctgatcccagccttggaaaaaacacaattgggtttaacagggacacaccatggagaagagaaagcatcagtgacaatcagagtcagtgtgacccaacaagggctgctggggtaagaggagagagagtgggtactgggctgtacctttagagtaataagcctagacagtcccatatttatttagtctatgaagctgaagttcctgtatttttttttttttttgagacagaattttgctcttattacccaagctggagtgcaatggcacgatctcggctcagcacaacctccgcctcttgggttcaagcgattctcctgcctcagcctcctgagtagctgggattacaggcaggcgccactacgcctggctaatttttgtgtttttagtagagacggggtttctccatgttgctcaggctggtctcgaactcctaacctcaggtgatccccctgctttggcctcccaaagtgctgagattacaggtgtgagccaccgcgcccagccttgaagttcctgtattttaaaggtactttagttttcaccaataccagtcttttgtagcccttgttctgttccttttctttccttctggaagctgaagcctctttccgggaacagttaggaatgtccatacttgaatgtatgattttctgatgatctccaaatcctctccactctctgccataaactgtaggttcctggtaggtttcctgaatccaatcacctcttcctgaatgactcactgaagatctgtcctacgcaaggtattgtctattttgtttctaatatgattggattttcttttataattttactatgttgctggcagatctgacttcaaatattactaaagaattctatatcattgttgttgtcattactattttttcacttcagtgtccacagtgccatgtaaaaaataatattatttttgacatttgaaactcgggccaatttcctttatttcatttttaccaatgtctttaaatgttcaggagactctcagacgattgatgctgagtagactgccttggcctattcatgaatttaagaggaatgctgtagtgtttatttattgattgattgattgagatggagtcttgctctgtggcccaggctagagtacaatgacatgatctcgcctcacagcaacctccgcctccgccttcaagtgattctcttgtctcagcctcccaggtaactgggattacaggcttgcaccaccatgaccagctaatttttgtatttttagtatttttattagaaatggggtttcaccatcttggccaggcttgtctcaaactcctgacctcaagtgatctgcccacctcagcctcccaaagtgctgggattattacaggtgtcagccaccactcccggcctgagaaatgctatagtgttttaatatggactatgctgttggctgtggtttcctttactaggttaaattgtccttggtggccgggcatggtggctcatgcctgtaatcccagcactttgggaggccaaggcgggtggatcatgaggtcacgagattgagaccatcctggccgacatggtgaaaccccatctctactaaaaatacaaaaattagctgggcatggtggcgcatgcctgtagtcccagctacttgggaggctgcggcaggagaatcgcttgaacctgcgaggtggaggttgcagtgagccgagattgcgccactgcgctccagcctaggcaatagagcaagactctgtctcaaaaacaaaagcaacaacaacaaaaattgtccttggtttcctcatgtcctgagagtctctgcactggctgctgtttgattttctgaaatatattattttgcattgtgtttgtggttaaggttttttttttattgacctattattgtgatgaactatgtaaacaaacatcctaatattaagcctgtttgctattaataggagtcttacatgttcacggtgtatgattcttttaaaataaacagaaacgtattttatttaactttactgttcaatttagtgtctatattcaggcatgaaatgaataaaaatttctgttttgtgttatggatgtcagttttgatctcaatctttattacacatccaaaatcgtgtttcttgaacacctactaatgatacaggagctaaaaagaaattacttaggcagctagtgagggtaagagagtccttggcaagggtttccattttaacaaaaagcatcccccaaaatcatttcttttttaacaaagagcagcctgaaaaaatcaagctgcagacatagaaaagcgggctgcaagcttgcacgggtgaatgctggcagctgtgccaatgggaaaaggctacctgggggccaggcgtgttcaacatggaggctccatcttccttttgtcaaccttgtgtgcattaaaaagcaggctatatggccgggctcggtggctcacgcctgtaatcccagcactttgggaggccgaggtggacggatcacgaggtcaggagatagagaccatcctggccaacatggtgaaaccccgtgtctactaaaaatacaaaaattagccaggcgtggtggtgtgcgcctgtagtcccagctattcaggaggctgaggcaggagaatcacttgaacctgggaggcggaggttgcagtgagccaagatcgcgccactgcactgcagcctgggcagcaagagcgaaactccgtcgcaaaaaaaaaaaaaaaaaaaaaagattcttcgtgcactttgtaaacggcacacctggtccaaccagtcctttgtgccctgtgtaaatcagacaccacctcctcaagcttatctataaaatcccatgcatttcacaatggaactggaagacccactcggcagcgcctcggagagagcttttctctttctctcatctatgaaacctccgctgttaaacccaatccttgtttgtctgtgtccttgatttccttggcgtgaggcagcgaacctcaggtattaccccaaacgaatgacactgcttccactaagtgacgggtaccatgtacacctctggaaagaaaaatgatgaaagaaaacacaacctcagatccacaaataaacgtaaaattacctacatgagatgcactcatgtagaaagagcacaggatggtctcttgtggggctcacgctctgacccccctaaccctcactctccactctccatctcactggtctctcaagtcccaattactaagctctctgagtcacgtgcaaccaggcatttcatcctcccagcctacgctgtctattctttccttgcttccccttttgaatcatgacccaatcttcttctcttagctccaagattcctatttcagaacccaacttcctagactaaattcgtcttctatgatgtttttctggtctttgattagttaaatatctctaggcatcagtatcactgccgtttttctaccatggtaaatgtaatcatttattttcaaatcttaaatttgccttttctttttctaggatgacatgatttatgtaagttttgaatattttgaaccaaatccatgaattatatatgttgatgatcgactctactgaccttagtacactgcaaccccactggaaagcacgtacacacgagaacagactcacacgtgacttgtgttttattttaatggctgtgtgcttttgtttcctcctcttatatatgtagtccacatgcttttttctcttcttggaagaatcacctggcaggcattctgaaggaaggagtcacaggaatcttcattaattagaagtgttgtatggcagtcaaagaggtaacagttctattcatcttcaccagaattccatccttgatggtcagcacagtttgagatggatattaagaaatgacactcatgcaaggcagattattgtgatgttaagaacggaagctcacatttatgatatggccgttgtatgccacagaaaccagagcagaaaaacaacatggatcatctcatttaatttcactcttcaatccgtccatgcagaaaatatttactactcttatttagaggtgaattatctgcagctaagagggtttacatgtctttcttttttttttttttgatatagagtctcactctgtcacccaggctggagtgcagtggcacgatatcagctccctgcaacctccgcctcccaggttcaagcaattctcctgcctcagcctcccaagtagctgggactacaggtgcgcaccaccacgcctggcaattttttgtatatttagtagagacggggtttcaccatgttggccaggctggtctcgaactcctgacctcgtgatccgctcacctcggcctcccaaggtggtgggattacaggcgtgagccactgtgcctggccacatgtctttcttaaggtcacacaatagtaagttggtggaccaaaattctattccagaaaatctccctcaagattccatttcctaaattacacctatgtattgtaccttggaagagtgatatatccaaaataactatcttataagaagaaggagtttaataatatcgacagctatcatttactgagactcttattgtacacaaagccacttttaaaacctcacaaagtgatactgacaatcatatttttagaaagaaaaaaataaacgtacacttagataaaaggtatatgttcttttgatcaagagcaaagtagcattactatagttaacaacattgtattgcatatttcaaagtaactagaaaagaggacgtgaattgttcccaacacatagaaaggataaatactgaaggtggtagacacctcagataccctgatgtgattattatgtattctatgcatgtaagaaaatatcacatgtcccccataaatgagtaaaacatgaggtatccatgaaaactaaggaactgagaattaactgtcacatcacctgtgtcaggtcacagaaaaaaagattgcctgagttgaaaatgcgtatcttaatcatgattatacacctattagcatgaaggaactatggagatgtatcaaaagacatggcgagtctgcagttatgtggaaggatcctatcaaagaagaaattactgtccataggtttgaatcaaataattaaaactcaggagtatatggtaaaggagaaagattactgctaaattaaaggtagtttgagaaactccgcacgtttcaaatggaattaggctaccaaatggctgagtgaatcaggatctttggaaggactccatagaagttgcatccaagggtgatattgaagagtgattgaatgttgctttttcctccttccccagtagacacaacagctacatggaagcagaaaaccttacagaattatcagaattcctcctcttaggactctcagatgatcctgaactgcagcccgtcctctttgggctgttcctgtccatgtacctggtcatggtgctggggaacctactcatcatcctggccgtcagctctgactcccacctccacagccccatgtaattcttcctctccaacttgtcctttgtggacacctgtttcatctgcaccacagtccccaagatgctagtgaacatccaggcacggagcaaagacatctcctacatggggtgcctcactcaggtgtatttttaaatgatgtttgctggaatggatactttcctactggctgtgatagcctatgaccggtttgtggccatctgccacccactgcagtacatggtcatcataaacccccatctctgtggcctcctggttctggcatcttggttcatcattttctggttctccctggttcatattctactgatgaagaggctgaccttctccacaggcactgagattccgcatttcttctgtgaactggctcaggtcctcaaggtggcccgctctgatgctctcctcattaacattgtcttgtatgtggccatggcactgctgggtgtgtttcctgtagctgggatcctcttctcctactctcagattgtctcctccttaatgagaatgtcctccaccgagggcaagtacaaagccttttccacctgtggatctcacctctgtgtggtctccttgttctatggaacaggacttggggtctatctcagttctgctgtgacccattcttcccagagcagctccatggcctcagtgatgtacgccatggtcacccccatgctgaaccccttcatctacagcctgaggaacaaggatgtgaagggggccctggggagactccttagcagggcagcctcttgtctcttacggtacacaacctcagaactaagaggatgctatgggtcccttaagcaaatgtgaatgcgcatatcctagatcttgctctcccctaaaatatatgttgcagtttcctattttcaaagcacctacgactttgcttaaaatgtttttgtatggccgggcacggtggcttacacctgtaatcgcagcactttgggaggcagaggcgggcagatcatgaggtcaagagatcgagaccatcctggccaacaggtgaaaccctgtctctaccaaaaacacaaaaattagctgggcgtggtggcacacgcctgtagtcccagctgctttggaggctgaggcaggagaatcgcttgaacccaggaggcggaggtttcagtgagccgaggtagcaccactgcactccagtctgggtgacagagcgagactctgtctgaaaaaaaagaaaaaaaaggtttttgtattaggttggtgcaaaagtcattgcagttttgccatcaaaagtaatggccaaaactgcaatgacttttgcacccacctaatatatttctgctgaagagctctctcagtaattccttttaaagttttcttctctgcacatagtccttaaagttccatctttgatccatttttttagtgccattcctgagatttctaacttgacattataaaactcttcatgtcaaatgctgacacgcgtcctcgaaaatgatccatttgaatgttactgtttcatcttaatttgattttgctcgttatccctggaagaaataaaatgaaattcataaaatattcaaagcaaagtacttaccatatcaaaactctgcttactagtttacatctataaactatttcatcctaaaaacctttctttgagttattttctctcattcactctatttctcagaggaagagattgagttgaggtcggctatatcaggcagtgtgacactgcagccccactactaactttgctgacccgaatttcataaaaatactcaggagcttttcaagttgaaagctgggatctagattcacaggctggttcattcataaaattcatagagattagtgcttcggagtaccctgagctgttgcttcattccttgtgattcttgcttttgtccttcttacttctcttttcccttctatccttcctcctttctcccttctttatcttagtctctccctccttcctttccttgttcctctaggtttttttaaaatttatttatttatttatttatttatttttgagacggagtctcgctctgtcccccaggctggagtgcagtggcacgatctcggctcactgcaagctccgcctcccgggttcatgccattctcttgcctcagcctcctgagtagctgggactacaggcgccccccaccacgcctgggtaattttttgtattttttttttagtagagacggggtttcaccacgttagccaggatggtctcgatctcctgaccttgtgatccatccgcctcagcctcccaaagtgctgggattacaggcatgagccaccgcgcccggcctagattgttttatttgttaatgttaatttccttcgttcctttttatggtggagcaatattccactagatgtgcagactgcaaagtgtttattcactcatccattgatggacaaggggtgatttccatctttgggctactgtaaatagtgctgccatgaacatgcatgtaaatttgtttgtttggttcttagtttccatcagttggggaagataactagcagtgggacttctgggtcctatggtaattatatgtttaactttttgagcaagtgacaaactgagttttatagaagctggcacattgaacatttccagcaatgtataaagttctagtatctccacatccttgccaatacttttttaaaaaaacaactgtagccagccaggtgtggtggttcatgcctgtaatcccagcactttgggaggctgaggtgggtggatcacttgaggccaggagtttgaaaccagcctggccaacatggcgaaatcccatctctaataaaacaaaaattaaccaggcatggtggcatacgcctgtaatcccagctacttgggaggcagaggcacgagaatgcttgaagctgggaggcagaggttgcagtgagccaagattgcatcactgtgacagagcaagtgacagcctgggtgacagagcaagactctgtctcaaaaaaacaaaaataaacaaaaaaacaatgaagtggtgtctcattgtgctcttgatttccattttcctaatgattcattgagcatctttccacatgcttgttggcagtttgtatatctgctatgaatcaatgtcttttcacatctttgctcactttgtaattgtgcagtttgtacttttgtttctcacctgtaagaattcctcatatattcagaatactcgacccttatcagatatatgcttgccaaatattccccacccatttgtatgttatctttccgttttttgaagtatacaatttgttattaactatattcatcataaagtgtaaatagatctcttaaaatcacttcccctgtctcactgaaactttgtgtcttttgactatgatctacccaatcccctcacttcacagcctctggtaacctcaatttactctgtttttatgagtttgacttgttttcatctacctgcatgtgagttcatgcagtatttgtcaagccgtgcgtggtttatttcacttaccagaaagtcctgcaggttcatccatgtggtagtaagtgacaggtttttccttctttgtaaaggctaaatagtattccattgtgcagatagaatacatttctttatatttctgatgatgagtccttaggttgattccatttcttggctatggtgatgaatgctgccatgaaaacagaaatgcagatatctctcaacatactgctttcatataaactcagtagtgggattgctggatcctaaggtagttctattttcaattttagaaggaaccttcatactgttttccataatgcagcactaatttatattccaaccaacagtatgcaatgtcccttttctccacatacccaacatttttacaattcaactttttttttttttgagatggagtcttgctctgttgcccaggctggagtgcagtgatgcaatcttggctcactgcaagctccccctccttggttcacaccattctccttcctcagcctcccgagtagctgggactacaggcacccgccaccatgcctggcaaatattttttgtattttttagtagagacggggcttcaccgtgttagccaggatggtcttgatctcctgaccccgtgatccatccaccttggcctcccaaagtgctgggattacaggctgagccaccgcacatggccaacagttcaacttcttgataacagcattctaacacgtacaaggtgatatgtcattgaggtttgaatttgcattcctgaagatttgtgaagctgagtgttttttcatatacctgttaatttgcatgccttctttctagtaatgtctattcagatcctttgtctattttccaatcaggttgttttctcacaattgagttgcatttcatacagtcttaatattctttctttttctttttctttttttttttttttttttgagttggagtctcgctctgttgcccaggctggagtgcagtggtgcaatctgggctcactgcaacctccgcctcccagcttcaagcaattctcctgtctcagcctcctgagtagctgggattacaggcacatgccacagtgcccggcaaatttttgtatttttaatagagatggggtttcaccatattggtcaggctggtctcgaactgacctcaagtgatacacccgccttggcctcccaaagtgctgggattacaggcatgagccactgtgcctggcctgaatattccctcttgaataggtcgttttttcttttttaaaatttagtcgagatggggtctccctaggtggcccagtctggtctcaaactcctgggctcaagtgatcctcctgccttggcctctccaaagtgctgggtttacaggcctgagccaccacaccaggccccctctttaattttgcaattgtattctcccattccataggatgtctcttcactctatagattgtttcttttgctgtgtgggaactttttagcctgatgcaatctcatttttctgtttttgcctttgttgcttgtgttttgggttcttatccaaaaaatcattgcccagtgtaatttcatggaggattattcctatgttttcttttagtggttttgcattttcaggtttactgagacctgagatgaggagctaatttcattcctctgcatgtggttttccagttttcccagcaccatttatggaagagactgtcctttccccactgtgtgttctcggcatctttgtcaaaaaatgatttgccataaattcattgattcatttctgcaccacctcttctgttccattgtcctttgtatctgtgtttctattggtaccatgctccattttcttaacagaacattttgatagagaaaagttttaaaatttgatgaagttcaatatatctatttttttgttttgttactcatgctttcactgttgtatctaacaatctgcttccaaataaagtgtaatcaagatattcctgtatgtttttttctaagagttttatgattttagctacattatatttaagctattgactttttatttatttatttattttgagacacagtctctctctgtcacccaggctggagtgcagaggtgtgatctcggctctctgcaacctctgcctcccgggttcaagtgattctcctgcctcagcctcccaggtagctgggattacaggtgcccgccaccacgcctggctaatttttgtatttttgatggagatggggtttcacatgttagtcaggccggtcttgaactcctgacctcaagtgatccacccgcctcggccacccaaatgctgggattacaggcatgagccattgcgccaggcctgttgatctgttttttatttgatttgatttttgtacatggcagaaagtagggttcaatctactttcctttgcatcgagtttgttcttggaagggtttagtttgttgtgctgtgaaacaccttattaataacatccacttggcagcagaatgtgttagcctagggttcaatctgtctaagtggtggttgtcagagagatcattgggtttataaaaaggtcacaaaggcaagattatgtttgacagagccctgctcatgaacattcagttcctcagcagaccagcctcttgtccatgacagatcaaggtctcagaactaagtggatgttgtaggtccattaggcaaatgtgaatttaaatatcccggctcgaccaggcttggtggctcatgcttgtaatcccagcactttgggggctgaggtgggtggatcacttgaggtcacgagttcaagaccagcctggccaatgtggtgaaaccccatctctgctaaaaatgcaaaattagctgggtgtggtggtgggtgcctgtaatctcagctacttgggagactgaggcaggagaattgcttgaatctgggaggtagaggttgcagtgagctgagattgcgccattgcattccagcctgggcgacagagtgagactttgtctcaaaaacaacaactacaaaactaaaagaaaacaagaaataaatatcctggctctttttctcctgaaaatcacatgcttcatttttactcttcccaaaacacttgtgatttggcttttgctacatgtttttactttaggttctctcagtaactcccttggtaatttccttctaacttttccgttttatatacagtctttaaagttccatctttggtccattttcttagagccactcttgagagttctcacgtgttgtttgaaacacttatcatatcgagtgctgatatgatgacatgctttcctcaaaaattacccatttgcatgttagcacccttcacctaaacttggttgtgttcttgtttcctctggaagaaattggatgaaaatcatacaatagtcaaggcaacgtgtttcccttttaggattgtgcttgttgctttacatgtatggctttatttaatcctgaaaacatttctttctttttgtttttgttttgttttgttttgagacacagtttcactctgtcacccaggctggagtgccatggcgctatctcagcccacggcaaccacctcccgggttcaagcaattcttgtgtctcagcctcccaagtagctggaattataagtgtgcaccaccacacctggctaattttttttgtatttttagtagagatggggttttgccatgttggccaggctgatctcaaactcctgacctcaagtgatccacctgcctcggcctcccaaagtgctgggattataggcatgagccaccacagttggccctgaaaacatttctttgacatgtcttttctcattcaccttgttccacaaaggaagaagcagatagaggtgaactataacctggcaacttgacgttgagaccacactccaactttgctatcctttatttcataagaacagtgatgtgatttttcacatcaaattaggaatgtagatttgtaagcttgtttgttctgatgattcatagtaatgaactgcctagaataactgagacgttgcttccttctttgtgattattccttttcttccctccctccctccttttttactttcttcctttcctcttctttcttccctcattccctcctctttcttccctcattccctcctctttcttctctcattccctccttccttcttgtctttctttctttccttctttatttgacctttatttcccataattgcagttttatgatctaaccccagattgtagaacatgtaataattatacgatagaaaagatttgttctctcatatagtttaattttcttctgagactttctggagatgtcttcaggaatggaagccacagaatgtggactgtgtttgggatgcagttcacccttttgatgagaactggtagaactgggtctgcagtgaaggatggggtagtagatggtgtcagggttcatcccacatccctaagaccctcccgccatctccacacacaccatcctgtctgccaatggtcagcatcagctgagggatccactttccccaatgcatggtggcagaaaggtaatgaatgcttacaattttatgttgctctggcatttttttttttttttttgagccagtgtctcacagtattgtgcaggctggagtacagtggctcactgaaatcttgaactcctgggctcaagtgatcctcctcagtctcccaagtagctgggactacaggcatgcatcatcacacccagttagggggtctctctatgtgactcaggcttgtcttgaaatcctggcctcaaaccaggattggccaccttggcttcctgaagcactgggattgtaggtgtgaaccactgcacctggcaggcatctattttgaatacaggcttagctttctgatgctagaggcagggttccattgcctttgacacagtttccaattccacaccaccctcaaatggctcaagctggtgcaattgttgctccttgcatcatcctttgaaagtgcaagttgtaaaagtttatggattcacctcagagggtttatctgagaagttgcctcaagcagttagaagatacagcttcctgatgcaacttcagctgcagagaccagggaaggaggggaggccttagaggcctgagacttctgctggcatccttctcaccaggctgcctcctcccgggagagtccctccttcagccccagtccctgtgcaggagcctggtttctggaaaaggccccacagcctggtggacacagacccaattccagtatcagacccatcagtgaccactgtgttgggattcaacagcctctccagactgtgattctcactggcaaaataaaaaatctgtctgtctttatttgatcaggagtactaaggctccaatgagacagtgtatttgaaaaaccttgggaatccactctccaaagcctagcaggttttgttactattatccaactcaatgtacaattctaaggtaaattgaaaaaatgtataaatccattaaaaagaaaagttgaaggtctcacatttcctggtttccaaataaactacaaagatccaggaattaaaacagtgtggtactataatacataaagacacatatacagaaaaatggaagagtaaagagagcccagaaagaaactctcacttatatggtcacatgattttccacatgggtgccaagaacattcattgggaaaaagacagccttttcaacaaacggtgtaggaaaaacttgatttcaaaatgcagaagaatgaaggtgggttcttaccttacaccatatgcaaaagttaacacaaaatggatcaaaggcctaaacctaaattccaaacctataaaattcttaaagaaaacattgatcaataccttcatgacattggatttggtaatgatttgatcaataccttcatgacactggatttcttagtgatttcttgaatatgtcaccaaaagcacagacaacaatatatagataacttggactacatcaaaattaaaaaacctttgtaactcaaaggatatactatcatcagagtcaaaagttaacccagggaataggaaaatatatctgtaaatcatatatatatgcttagaggctaacaaccaaacaatattaagaactcctacaactcagcaaccaaacaaatgcccattaaaaatgggcagaaggccaggtgtggtggcttacacctataatcccagcactctgggaggccaaggcgggcagatcacctgaggtcaggagttcaagaccagcctggccaacatggtgaaactccgtttctagtaaaaatacaaaaaaatacaaaaaaaattagcgggcgggtggcctgcacctatagtcccagctactcaggaggctgagtcacgagaatcgcttgaacccgggtggtgaagtttgcagtgagccaagatcatgccactgcattccagcctgggtgacagagcaagactccgtctcaataaagaaaaaaaaaaattgggcagaggacttgaatagacatttctctaaagaacatatgcaaatggccaatgagcatacaaaatgatacccagcatcactcatcaataggggcatgcaaataaaaatcacaatgagataccacccaataggatggctattaagaacaaacaagcaaaaaaacctgtcgagttttggtgaaactgtagggaaggaggaatgcttacacagggctatggaaatgtaaaatggtgcagcagtatgaaaatccatatgatggttcctcataaaatgaaaaatagaactaccataggatgctgcaagttcacttctgggtgcatacttaaaaggatcgaaaacagggatttgaacagatatttgtataaccatgtgtggaggaaaagttaaatattaaattcgaactcaattgaacatggacacaaacaatggtcagcaagtcctcgaatgggtcgtgtgagccccttgaggcgttcatccagcgctgtttcggagaaatctctatttcaatctattcctatacattagttattgaaaaacaatagacaatcacgaaaacgagttgacctttttgcgttccttgggcccagtcgtgaagggccctcgtgactgggcctcatgccaaacaactcattacaaaaagagttagggtcccagactgcgccaaagcttcaggagacctctccttgtctgtgcacggactggtggctgactctggagcccagactgttgctggtgaatccttcatagtctggtgagtgtgtatatatatatttttttttcgcttcggcgacttcccgttgcaatttgcttattatatcaatgtgcttttttttttttttttttttttttttttttatggagtcttgctctgtctcccaggctggagtgcagtggcgcgatctcagctcactgcaacctccgcctcccaggttcaagcgattcttccgcttcagtctcccaagtagctgggattacaggcacgggccaccacacccttctaatttttgtatttttagtagagacagggtttcaccgtgttagccaggatggtctcgatctcctgacctcgtgatctgcctgccttggcctcccaaagtgctgggattacaggcatgagccaccgcgccgggcctcaatttgcttattatagtaatttgcttattatatcatttgcttattatatctacattgccatttacgtgggataaagcttatttacccttaaaggtattgtgtgtgtgtgtgtgtgtgtgtgtgtgtgtgtgtgtgtgtgtgtgtgttttcttctccccttgtgcgtttcctgcacagaacaccatgtttatagcagcgttattcacaatagctaaatatatggaagcgacacaagcgtccaccaacagatgactggagaaacacaatgagatccatccatacaatggaatatttttcagctttaaacaggaaggcacttctgacacatgatacaacagggatgaatctagacaacattatgctcagtgaaagaaaccaatcaccaaagggcaaatacagactgattctatttatgtcaagtattttgtgcagttagatttgtagaaacagtaatcagaatggtggttgctagtggttagcgagttgaaggaaaggattttgtttaatggttgctgagtttttgttttgtaggatagaaaagttctggagatggatggtgaggatggttgtacaacattgtgaatctacttcatgccactgagctatatactttaaaatgatgaaaatgataaaatgttgtatttaccattttatataaaaccatttatatgtataattttaacatttatatgcaatatcttttatataataaaaaggaaaataaaaagtagacagatcttaataaaaaataaatgaaagaagtgaatagtacactcaggattcctcctgagtggaggaagagcccaaaagcttctgtggacattcatttcctcttcttcttcctctgttaatatggggcagtccttagagactggggaacatggaccagtttggctaatgaggagctctgtgccttgagcccccaaggccctagaatagtaaatactcagcctatgcctccagccctgcagtgtgagcttccagtccagtgggctccacacctgtcgtctgcatcaggaggctcatgtctgaccctgtcttcctgccagtcctgaggacggagcctgagcctccatcgtgcaccacacagggaggacagcggacctactctccatggtcatggcccagcagaggggaagcgcagctcagtgagtgctgagggacggttgggagccttgtttcctcatcctcagcacaaacaggacagtggggtggcagatgggaggacaccaatgtgcaaaatgtcagctcagacgactgtggagtttatgttcggggtttattttcagggtttatgttcagggttgtgtgtgtggtctttcatttcatattgctgcactattttacatttccatactcccttacaagcattcctacttctctatggtttcaccaaaacttgacaggttgttttgttcatttgctcttaatagccatcctattgggtggtatctcattgtgttttttatttgcatgtccctgccaatgagtgatgttgaatatcactttgtatgctcattggctgtttgtatatgttctttagagaaatgattattgaagtcctctgcccacttttaatggggtatttgttttgttgttgagttgtaggagttcttggtgtagtttctttgttagcctcttagcatatagatgatttgcaaatatattttcctattccctgggttaacttttgactctgatgaaattttacattcctcccatgctgattgaacttcccatagacatctcacccaggatagcaaaaagtgggtccctctaaactgtgccctaaacacaacaaaaagtttataaaggtgatgttgaggatgaggaggaagatgccagtcaccatgacatcatgaattcttactgagggcttcctaaatgcatggatctcagctctgtgttttgtatagcttgtttcatttcatcttcataatttttcctgagttatagctgcacacattattattattattgtacagaggaggaaaggagcaatgcatttttatatagctcgtaccagatcatgaggtagaaagaggtgaagccacatttgcaccaggcagtctaagtccagacacatagcatttggccaggcctctctctgcatccaaccttccccccctcgaatccgtgtcacacccagcaggtgcccctgctaactgtacccttccctttggggcttcctggtagaccacagctagaccagtgggtgccacgttcactgtgtcaagtatagaaagggcagctgagatcacatcaaagatcccagaaagaactggcacaggatcactcagggcgcatctctcccttgcccctgtttctggctttccttgcagctctctacttcctcaaaggagaaataaaatcagggtcttggaatccatttctattcaggaaaccggaaatagtttcaaaatgcgcttcagatgcacctgtgcttaagacctctggccattgcttaaaactttctgagagctgggaaacaatgaagaagtttagtgccagagactcaaagaccaaccatttaattccaaatcctgcccatgcccctgatctgtgtgacaaggggtgagatgtctgtgtctctgaggctcaacactatcatctgagttgatttctggtagatcccactgcagtgagcaatgattaaacagaccgtgtgtgctcctgtgtgatccctatgtgatggatgcataaagtgaagtgtattctacatgttttctattaatattccaaggttaatctccataccattgaactgaaatatccaggaacctagctatggttcccaatgtctctgacaggacatttaatttttgcccttatataagtaagtactgaggattgtgagaggaatatttgagtttctttcaactctgatttcccagagcctgtatcttgcttggtacagaggagacaccaaaaattagaatctctgttacatattgaatagacccttccttagttcacaaaactggctgtgatcagtgtgacttcaacacactcactgctttcctatctgtactttcattccttccaggaatgtgtcacaaactaggcagaaggtaaaatagcacttttttgtgtctatattatggacacataataatagcatctacaacattcaattacttaaagaccatggcagagatttttacaggcataaaaaaagagaaaaggatgcagaaggaagtgggggcaggtaaaccttattgtttagatcaagatacattttagagtttcacatgattccagccacaacgaaagtaatgccaaagtattttaacattaccttggccaggcacagtggctcacacctgtaatcccagcactttgaaaggcagaggtgggcagattacttgaggtcagaagtttgagaccagcctggccaacatggtgaaactccatctctactaaaaatacaaaaatcagctgtgcatggtggggcgtgcgcctgtagtcccagctactcgggaagctgaggcataagaatcgcttgaacccaggaggcggaggctgcagtgagctgagatcatgccactgcattccagcctggtgacaggctcaaaacttcgagactcaggtcttaaaaaaaaaaattaaaagcattttaacattatattaatgttctgtcatccacaggtacgttgcacactatcaacatctttgctatcagtgatgtcctggtaattatgtgcatttaactaaaccttccttttaattacttattgatttaatagtcaaggtctcactctgccactctgcctagagtgcggtggtatgatcatggttcagtgcagcctcgaactccagggctcaagcgattctcctgactcagcctcctgagtagctgggactacagggcggcgccaccatgcctgtctaattttttagttttttgtaaagatggggttttgctgtgttttccaggccggtcttaaactcacatcctcaagcaatcctcctgccttggcctcccaaagtgctaggattccaggtgtgagccaccaccctgggctactttcttatcaaaactccaagtccacctaaggcaaggacaggaattataattaagtgaattttaaaagaaagcccacatatttgagtgagtacttacttccatgaagaatgaaagtcagaaaacgtaagaatgatggaaaccgtagaatataactggtatgtaaagatgttttctggctatgaactatgaactttcattgagttttgagacaacatgatcctagatctcattgagtgttgataaatatcctcaatcaatggaatttgtagaattgtattagaataaaacaagacatagctgactccttcttagtatcctttcaatggatttaatctttttcttaaaggggcaagaatatttttgttgtatattttttcctgataaattaggctatattttaccgtgatcatggatttctaaaatctctaatgtttttgctctcctaacattcttcaatagactgtctctaagttaagtgtatacagaaagaggtgaataacacaaaatcaattatgaagtaactctaaggaaattgggtttgtcacaactgagaactattgctgagggtgtataatcctatgtgaaaacttaatttcttaattgcttgtatccaaaatatagacacagtgctagatgctggtttacttatgtcctattttccaattctctttttttttttcctcaaaaggtgtccgagctacacagagccacagaatctcacaggtgtctcagaattcctcctcctgggactctcagaggatccagaactgcagccggtcctcgctgggctgttcctgtccatgtacctggtcacggtgctggggaacctgctcatcatcctggctgtcagctctgactcccacctccacacccccatgtacttcttcctctccaacctgtccttggctgacatcggtttcacctccaccacggtccccaagatgattgtggacatgcaaactcacagcagagtcatctcctatgaaggctgcctgactcagatgtctttttttgtcctttttgcatgtatggatgacatgctcctgagtgtgatggcctatgaccggtttgtggccatctgtcaccccctgcactaccgaatcatcatgaacccacgcctctgtggcttcttaatcttgttgtctttttttattagtcttttggactcccagttgcacaatttgattatgttacagctcacctgcttcaaggatgtggacatttctaatttcttctgtgacccttctcaactcctccaccttaggtgttccgacaccttcatcaatgaaatggtcatatatttcatgggtgccatatttggctgtctccctatctcagggatccttttctcttactataaaattgtttcccccattctgagagttccaacatcagatgggaagtataaagccttctccacctgtggctctcacctggcagttgtttgcttattttatggaacagggcttgtagggtacctcagttcagctgtgttaccatcccccaggaagagtatggtggcttcagtgatgtacactgtggtcacccccatgctgaaccccttcatctacagcctgaggaacaaggacattcaaagtgccctgtgcaggctgcatggcagaatcatcaaatctcatcatctccatcctttttgttatatgggatagaaatggcagcaaaatttaacacctaggcctgcaaattctgcctccttggtcacattattttggttgcttgatggctttcattcctctctgggtttcgtatgtgaatattgcttgctttgttttgtctttaattgcaatgggtgagtattctggtatcctttgttcatcatacacatcatgaatgattccaatatacctagacagcctcctttagtatctgtgcaatgaccttgatatccaggtgcaatcacaatcttttctgatagacttgaaatcctcacttaactttgtcaagaggtttttggaaactgcaactttaaaaaaaaagcgcagcaggtcctgaaataagttcattttgttcaatgttgtttagttttaattttggtgagaaatgaataaattggtttcatggttcatcgttttgcttgaattgtggtttctaattttctgtggaggatgttaagtgaggacttatcgtacttcgtatttacctccctttctacagttcctgtgtaatttctgtccaaatcgcatctaggaaatcactttaggcagcttacgtatgatgatgtctatcaatggtcctcacatttggttttattgaaatcacctggggacctcacaaatactgaggcctgggtgtcattaccaaaatttacttggacctgtgtgggttgaggaattttaaaagcaccagaaatagttcaggtgatgatgtttctaaagggacggagctacaatgggtaagttacaaaagaatgtagcaccaggcaacgtgattcattcaaatatcttcttaaaacgcattattgttcagcactgtagaaatttacattatggccgggcgcggtggctcacacctgtaatcccaatactttgggaggctgaggtgggcagatcgcctgaggtcaggagttggagtccagcctggacaacatagtgaaaccccatctttactaaaaatacaaaaattagccaggcatggtggtgcgtgcctataatcccagctcctcgggaggctgaggcaggagaatcacttgaatccaggaggcagaggttgcagtgggctgagatagtgccattgcaccacagcctgggctacagagggagactccatctcaaaaaaaaaaaaaaaaaaaggaaaaaaggaaaagaaaaagaaagaaagaaattaacattatgttgtttttttaccactataatttttattgtacatttattcagcatatatttatacacatacagttttttctcctctttcactcttgtgcatacatagaaagggaaatagaaaagaataacatggtaacagtatcactgtagcttcacattcagagactaatttttgaaatttgctatagttttagtttttataaacaaaatgtgatatatatatatacacacaatggaatataattcaaccataaaatgcgtcacatcctgtcatttgcagcagcgtaaatggaaagtgaaataagccaggcacagaacaataagtattgcatattctcactcatgtgtaagagctagcatgtgagtcccatggcattagagagaagagtggtggttaccagaggctgagaagggtgtgtgagtgggtgtgggggatgaagagagtttggttaatggacacaaacatacaatgagatagaaggaataagttctaatatttggtagcacagtagggtaagtatagttaaaaataatttattatatatttcttttttttttgagttttgcttagtcacccaggctggaatgcaggggcatgatctcagctcactgcaacctccacctcctgggttcaaccgattctcctgcctcagcctcctgagtagctgggattacaggcgccagcctccacgcccagctaatttttgtatttttagtagagaggacgtttcaccctgttggccaggctggtctcaaactcctgacctcaagtgacccatccgccttggcctcccgaagtgctgagattacaggtgtgagccaccttgcccatttcttacatatttcaaaatagccagaagagatttgaaatatttccaagaaaaagaaattataaatgtttggagtgatggatattctaaatatccataattacacattgcatgcttatatcaaaataccacgtgtactctataaatatatgcaattattacatatcaataaaaaattgatggctattttaaatggaacttttgaaaattaaattataactgttttagtgtatagaaatagagtttttttttttggcataaagaacttcatggctgggcgcggtgatcatgaggtcaagagattgagaccatcctggtcaacatggtgaaacccaatctctactaaaaatacaaaaattagctacacgtggtggtgcttgcctgtaatcccagctactcgggaggctgaggcaggagaatcacttagacccgggaggctgaggttgcagtgagccgagatcgtgccactgcactccagcctgagcgacagagctagactccgtctcaaacaaaacaaaacaaaacaaaaaaaacttcatgcagtcacgcaatatacccatgtaacttaaattcagcctaaagttgtctccttacgttttttttttttttttttttgagacggagtctcgctctgtcgcccaggctggaggacagtggcccgatctccgcccactgcaagctccgcctctccggttcacaccattctcctgcctcagcctcccgagtagctgggactacaggcgcctgccaccacgcccggctaattttttgtatttttagtagagacggggtttcaccgtgttagccaggatggtctcgatctcctaacctcgcgatccgcccaccttgacctcccaaagtgctgggattacaggcgtgagccaccgcgccctgccctccttacgtattttaagttcagcctgaaagtttctccatgcatatgaactgtaacctacctggatgtttaaacagattgtaccctatgcctgagccaattacctgtttttgagccatcaaagctggccagcctttcaaaccgtattcaaattcgtcgaacgccgagaggtaacccatccagctgtttgtgtacttcacttccattcttttgtacgtcacttttctttttctgtccataaattttcttcccctaaatggctgtactggagcctctctgaacctattctggttgggggttacccgatttgcgaatcggtatttgctcaattaaactctattaaatttgacccggcgtgggggctcatgcctgtaatcccagcgctttgggaggccaaggcgggtggatcacttgaggtcaggagttcaagaccagcctggccaacatggtgaatccccgtctctactaaaaatacaaaaaaaaaaaaattagccggatgtggtggtgggcacctgtaatcccagctactcaggaggctgaggcaggggaatcgcttgaactcaggaggtggagtttgcagtgagccgagatgacagacaccactgcactccagcctgggggacgaaaccagactctgtctcaaaaaaagaataaaaaataaaacaaaaaaacccctctattaaatttaatttgtctaaggcttttcttgtaacacaacaaaactgcacatgtactttctgaatctaaaataaaataaaatggccgggcatggtggctcacgcctgtaatcccagcactttgggaggctgaggcaggcagaccacttgaggtcaggagttcgagaccagcctggtcaacagctcctaatgtcacaggggtgtacacactgtaatattattcacaatatcctaaagggatgttactactaatgtcacaatgcatgttcaccctatgatattatctgtaatatcctagggggatgttactgctaatgtcacagggggtgtataccttgtaatattatttgtaatatcctagaaaaatgttactcctcatgtcacagggggtatacactctatgatattattcataatatcctagggcgacattgctcctgttgtcacagtgggtgtacgccccgtgatattactcataatatcccaggaaaatgttactcctaatatcacttagggggtgtacgcaatgtcacaggggatgtacaccatgtgtactcctaatgttacttctaatgtcacttggggtgtacagaatgtcacagggggtgtactcctaatgtcataggcaatgtactcctaatgtcatagggaatgtactcctaatgtcacagggggtgtacacaatgtcacagggggtgtaaattgtcacagggtgtgtacattgtcacaggcggtgtacacaatgtcacagggtgtgtacaccatgtgtacacaatatcacagggagtgtacaccatgtgtacaccatgtcgcagggactgtataccatgtgtgcacactccctgtgatattattcataatattctatggggatgttacttctaatattaaatgtgatattcaccatcactattctagaaggatgttacttctaacatcacagggtgtgtacaccatatgtgtacacaccctgtgatattacacataatatcttagagggatgcttcttttaatttcacagggtgtgcacaccatgtgtacacaccctgtgatattattcataatagcctagggggatgttactcctaatgtcacaaaggaagtatcccatttatgtacaagtcctgtgatattattcctaatatcctagggggatgttgcttctaatatcacatggagtgtacagcatctgcgtacaccttctgtgatattattcataatatcctatagggatgttacccctaatgacataaaatgtgtacaccatgtgtgtaaaccacctgtgatattactcataatattctagtgggatattaattttaatgtacacaaagggtgtacaaaatgtcactggctgtacatcttgtgatattatttgtaatatcttaaaaggatgttactcctaatgtcacaggtggtgtaaattccttggtattatttgtaatctcctaggaagatattacttccaacatcacagtagaagtatgtacatggtacaccctctgaattgtttgtaatatcttagggagatataattcctaatatcacagtgggtgtaccccatgtgtgtataccctgtgatattattcataatctccagggtaaatattacttgtaatataacagagagtgtacactctgtgatactgttcataatattttaggaacatattgcttctaatatcacagtgggtatacacaatgtgtgtacactctattataatattccttatattttaggaatataaatgtcacagtggctgcacacgatattattcataatatccttggagtgtgttactattaatatcacagtggttgtacactctgtgatattattctttttatactagggggatgttactcctaatgtcacagggggtgtacgccctgtgatattatttgtaatatcctattggaatgttactactaatgtcacaatgcatgtacaccctgtgatattagttgtaatatcctagggggatgttactcctaatgtcacaggttgtgcttgccctgtgatattatttgtaatattctaggcgtatgttactcctaatgtcatagtgggtgtacactctttaatattattcataatatcctacggggatgttactccgaatgtcacagagtgtgtacaccctgtgatattatttgtaatatcctaggaagatgttaatcctaatgtcacagggggtgtacaccatgtctgtaaaccttctgtaatattctacagggatgttactcataatattacagggggtgttcaccatgtgtgtacaccccctatgatattattcataatatcctagaaggatgttacacctgatgtcacagggggtaaacaccatgtgtgtacacaccctgtgatattattcataatatcttagggggatgttactcctaattttacagaatgtgtaaaccatgtgtatccacctcctgtgatattatttgtaatatcctaggggggtgttacttctactgtcacagggtgagtacatcatgtgtgtacaaccactgtgatattatttttaatatcctagggggatattgttcctaatgtcacatggaatgtgcaccatgtgtctacaccttctgtaatattattcgtaatatcctaggaagatgttaatctttatgccacagggggtgtacaccatgtgtgtataccccttgtgttattatttccaatatcctagtgggatgttacttttaatgtcacaaagggtgtacaccttgtgatattactcataatatcctagaaaaacgttactcttaatgttacaggaagtgtaaccctttgaaattattcataatattctagggtgatattactttaaatatcacagcgggtgtacatacaccatgtgtctacacccttgatattattcataatatccagggtacatattttttctaatatcaatgagggtgtacaccctgtgatatttttcataatattttagggagatattgcttctaatatcactgtgaggatacaccatgtgtgtacactctctgatattattccgtatgtcctagaaagatattactcctgatatcacagtgagtgtaccccatgtgtgtccaccctgtgatattattcataatatcaagagtaaacattacatctaatatcacagagagtgtggaccctgtgatatttctcaaaatattgtagggagatactgcttctaatatcacagtgggtacacaccatatgtgttcattctgtgatattattccttatatcctagggagatattactcctaatatcacagagggtgtacacccagcgacattattcgtaatatcctaggaggatgttactcctaaggtcacagtgggtatacaccctgtgatattattcataatattctaggaagatgttacttttaaagtcacagggcatgtacaccctttgatatcattcgtaatatcctaggcagatataactcctaatattatagcgggtgtaccccatgtgtgtacacccttgatattactcataatatccagggtaaatattcattctaatatcacagagggtgtacatcctgtgatatttttcataatatttttggagatattgcttctaatatcgcagtgggtgtaccccatgtgcgtacactctgtggtattattttttatatcctagggagatattacccctaatatcacagtgggtgtgagaggttacagcgtgctggcagtcctcacagccctcgctcgctctcagcgactcctctgcctgggcttccactttggcggcacttgaggagcccttcagcccaccgctgcactgtgggagcccctttctgggctggccaaggcgggagccggctccctcagcttggtgggaagtgtggagggaaaggcgcgagcgggaaccggggctgcgcgcggcgcttgcgggcccgctggagttccgggtgggcgtggccttggcgggccccgcactcggagcagcaggccggcctgccggccctgggcaatgaggggcttagcacccgggccagcggctgtggagggtgtactgggtcccccagcagtgccagcccgccggcgctgcgctcgatttctcaccgggccttagctgccttcccgcggggcagggctcgggacctgcagcccgccatgcctgagcctcccacccactccatgggctcctgtgcggccggagcctccccaatgagcgctgtcccctgctccacggcgcccagtcccatcgaccacccaagggctgaggagtgcgggcgcacagcgcaggactggcaggcagctccacctgcagccccggtgcaggatccactgggtgaagccagctgggctcctgagtctggtggggacgtggagaacctctatgtctagctcagggatcgtaaatacaccagtcagcacactgtgtctagctcagggttttcgaatacaccaacggacactctatatctgactactctggtggggccttggagaacctttgtgttgacactctgtatctagctaatctggtggggacgtggagaaactttgtgtctagctcagggattgtaaaggcaccaatcagtgccctgtcaaaacagaccactcggctctaccaatcagcaagatgtgggtggggccagatgagagaataaaagcaggctgcccgagccagcagtagcaaccctttccggtcctcttccaaactgtgggagttttgttctttcgctctttgggtacacactgcttttatgagctgtaacactcaccgcgaaggtctgcagcttcactcctgaagccagggagaccagagcccaccgggaggaacgaacaactccagacgcgctgccttaagagctgtaacactcaccgcgagggtccgcggcttcattcttgaagtcagtgagaccaagaacccaccaattccggacacaggtgtacatccttttatattattcgtatttgaccttgctgccttttcttttcttttcttttttttttttttgagatggagtcttgctctatcgcacaggctggagtgcagtggcgcgattttggcttactgcaagctccgcctcccggattcacgccattctcctgcctcagcctcccgagtagctggggttacaggcgcccaccaacatacccggctaatttttttgtatttttagtagagacagggtttcaccgtgttagccaggatggtctcgatcatcctgacctcgtgatccgcccacttcggcctcccaaagtgctgggattacaggtgtgagccactgcgcccggccccttgctgccttttctaactcacactacggaaggaatggaacagataataagaaaatgagattagactattctgcagtgcagctgccgcagggcacttttaatttccctgttaggctgtagatgaaggggttcagcatgggagtaaccaccgtgtacatcactgaggccactgcaccttttctgggataagaggacatgtctgaactgaggtcccctccaaagcctgttccataaaataagcaaacaactgacaggtgagagccacaggtggagaaggctttatacttcccacctgatgatgaaaccctcagaatggaggaaacaattttatagtaagagaaaaggtccccgaaatgggaagaaaaccaaatatggcagcaaggaaatacatgactatgtcattggtgaaggtgtcacaacaggcaagggtgggggagttgagaagggtcacagaagaaattgggaatttccacatccttgaagcaggtaatttgtaaggcaatccaattgtgcagctgggagtctaaaagactgagaaaaaaagacaacaaaactaggaagccacagaaacatgggttcatgatgactggataatccagagggtgacagatgtccacaaaccggtcataagccatcacactcagaagcatgtcttccatgcatccaaaaacggcaaaaagagatacctgagtcaggcagcccgcataggagatgactctgctgtgagactggatgtccacaatcatcttggagactatggtggaggggaaaccgatgccagccaaggacaggttggagaggaatctggctatttcccggtttccatttaatattggagttacagagaatgtcttaattcacttctattagcccttgcattggattggcctttaatgtgccagagacttatgtttgatgcttgtttcagtgactctccgggtctaagtattttgtccaaatgaatatacaatggtatattccttacttattgaactttagttatttgataactgatacatcactgaaatacaagacattctcagaaggtggcaattaacgtgttgaccagggtggcagtcatctgaaggctggaaggtagaggatcaacttccaacctcactcacaaggttgttaccaggattcggttgctctgaaacattagacagaaaattccctcaatttcttgcattaagggtctctgcataaagcagctgaccacatggcatttggcttccatcaatgcaaagcaagatggggcagcaaaataaaagctgaggtccttcgttctattctcagagtgacatcacatcacttcttccacactctcgtagttgggaatcagtcaccaggtgcatctcacactaaataggagcagattgcccaagggtatgaaaaccaggaggtgggatgtccttgggaacatctcagatgctgctcatcacacaggccccattttctgccaggactttgggctccaaggacatcaagaaccaggtctgtttcctctgttttctttttctttctttttttctttttgtgagatggagtcttgctctgtcacccaggctgaagtgcagtggcacaatcggctcactgcaacctctgcctcctgggttcaagccattctcctgcctcagcttccccagtaactggaattacaggtgtgcaccaccacgcccagctaatttttgtattttagtagaaatggggtttcacatgttggacaggctgatcttgaactcctgacctcgtgatccgcccaccttggcctcccaaagtgctgggaatacaggcgtgagccaccgcgcccggccctcagtttcctctgttttctagcataggatccaacacaccacaatatctcaacatgattcagtggagacggagaacttcctctgtgctgggtccttctgtggaccccaccatactgctcctggacatgcagtgcaatgtagcccccttctgtagctgaatttaggcaatgtccaggggttttgatttctgctcacttgaaaggctgaagtagcttcagaatataagtttcttttatttatttactttttaagatgaagtctcactctgtcacccaggctggagtgcagaggcatgatctcagctcactgtaacctctgcctatggggttcaagccattctcctgcctcagcctcccacatagctgaaactacaggtatgtgccacaacgcccggctaatttttgtatttttagtagagatggggtttcaccatcttggccaggctggtctcaatctccttaactcgggtgattcacccaactaggcctcccaaaatgctggcattacagtcatgagtcactgcacccggtccagaatatagcttctatagtatcattgtgtgttcccagctcttgagcactctaataaaaggtgttttctggctgcctgggttttttctaatagatcacgtgagatgcacgtgaagagtggtctgttgccatcttctgcattttatcaatggagctccctggctgagaaatatctactctaaagaaatgagatttatggcctggcgcgatggctcatgcctgtagtcccagcactttgggaggccaaggcaggcggatcgtctgcgatcaggagttcgagatcagcctggccaacgtagtaaaaccccgtctctactaaatatacaaaaaaaaaaaaattagccaggcatgattgtggtcgactgaagtcccaactatttgagaggctgaggcaggagaatcccttgaaccccggaggcggaggttgcagtaagtcgagatcgcaccactgcactccagcctgggcgacagagtgagactccgaaaaaaaaaaaaaaagaaatgagatttgtctttagtggacataaagaacactttcatatacaccagatgaaattggatatggatgaaaggatgttattgacctgtggtgtgtaaataaatgacagtgtttttgagggagaccagatggcaggtgtatagaggtaaatagggaaagaagtctatgatttgagacacatagaatgacagcacattggaaaaaagaatatacttattttttgagacagaatcttcctctgtcacccaggctggagtgcaatggtacaatcacagctcagtgtcacctcgaactcctgggctcaagcaatcctccaaacttcaccctctagaatagctaggactacaggaatgtgccaccacacccagctaattttttatttatttttatttattttattgagatagagtctctctctgttgcccaggctggagtgcagtggcacgatcccggctcactgcaacctccgcctcccaggttcaagcgattctcctgcctcagcctcctgagtagctgggactacaggcgtgtacccccatgcccagctaatttttgtgtttttagtagcgacatggccaggctggtctccaactcttggcctcaagtgatccacccaccttggccttctaaagtactgggattacaggcgtgagccactgcacctagcttgtaatactgttcttgccagtacatttgactatatcccctcaaacagcctctcagttaagcaattatcgctctacagataaaatattaatcattcgatagaaatatggtttatatcataccctgagccatgcagcttataacatcattactaatatattctggaaatatgcacataaaattaaattctttaaatgtgatactagaagctaccatttgatgggaaactactctgactggttcatgacacaagatatacaatcggctgggcacagtgcctcacgcctgtaatcccagcactttgggaggccaaggcgggtggatcatgaggtcaggagttcaataccagcctggccaggatggtgaaaccccatctctattaaaaatacaaaaaaattaactaggagtggtggtgtaatcccagctactcgggaggctgaggcagagagttgcttgaacccgggaggcagaggttgcagtgagtcgagatcatgccactgcactccagcctgggtgacagaggaagactccatctcaaaaaaaataaaaataaaataaaataataataataaaaagatatgcaatcattgcatggccttgggggaaaaaaaggctattgcacttactttgctgcagagaaatctgaggctcagaaaggagctgtgagttgtgatatcaccaggacaccagtgtcattgctcagacactcctagacacaaggacgctgttgaggtatatgggatccgcttgtgatgtttatgatgaacaaatgataccagaatactcacccgttccaactaaagacccaaaaaaggaagcaatattcatacatgaaacatggagagaaacgaaagcaaacaagcaacaaaaataatgtgaccaaagagacagaatttgcaaatagacatgtttgattttgcaatatatttcagcccccactacagaaaggatggaacagataatgagattagactgttctgctgtgcagcctccacagggcacttttaatgtccctgtttctcaggctgtagatgaaggggttcagcatagggatgaccacagtgtacatcactgaggtgaccgcacccttcctggggaaagaggacgcagctgaactgaggtaggctccaagtcctgttccataaaataagcaaacaactgccaggtgagagccacatgtggagaaggctttatacttcccatctgatgatggaattcttagaatggaggagacaattttatagtaagacaaaaggatccctgagatgggaagaaaaccaaatataacactatctaaatacatgaatatgttattgatgacactgtcagaacaggcaaggttgagaagttgagatggctcacagaaaaaattaaagatttccacattcttgaagcaggtgaattgtaacacaatctgattgtgcagctgggagttcaacaggctaagaataaaagacaccaaaactaagaagacacagagatggggattcatgatgactgggtagcgtagggggtgacaaatggccacaaactggtcataggccatcacagtcaggaccatgtcattcatacacacaaaatagataaagacatctgcatcaggcagccctcataggagatgattctgctgtgagattgcatatcaacaatcatcttagggatggtggcagaggtgagtccgatgtcagccaaggacaagttggagaggaagaagtacatgggggtgtggaggtgggagtcacagctgacggccaggatgatgagcaggttccccagcaccgtgatcaggtacatggacaggaacagcccaacgaggacgggctgcagttctggatcctctgagagtcccaggaagagaaattctaagacacctgtgagattctgcgagtctgtgtaacttggacaccttgagaagaaaagagggttgaaaaaataaaagacataaatcagcacttactgctgtgtgcatattttggatacaagcaattcacaagtaacattttcacacttgaagaccatacaccctcagcaatatttctccattgtgagaaacccaaaaatctcagaattattacatgatttacttttttgctattcaactctttctgtatatacctacttcagagaaaatccactgaagaatgttaaaagatcaaggacgtaatatataacaaatccatgattgcaataaaacatggcctagtcttttcagaaaaaaaaaataagaaatgtacttttctaagaaaaaaaaagcccaatttaattaaaagaaattaagaagcagtgaaatataattcattttattctgacactgtgctacaaactccttggatgtagaatatttataaacactatacaagagctaggagcacattatctagaaactaaaacagacctgctagttcataatcagaagacctttttacatgccaattacttttcatattttttatcattcttaggttttctgacatcatttcttcacacaagtaaatgcacactcaaatataggagctatgtttccaaatttatttaatatatagctcttgtccttggctcatgttttctttgggttttgataagaaagctttgttgcacataatcataggccttcagcaaccacacagctatcgataatgtgtaatgcatgtgtcatcactaaataataatgaagtttaataacattttctctttattttattttagcctggaatgatgcgaaactcaaaattgtgtctaagcacgagaatcaggtctacctgccctcttctctttgtgcctttcttcattctgatatagctacaaaaatctctgcgatggtatttaggtacttgaacattgcagatgctattaaatggaattctaaggtccctgtgtctgtgacatagacataaacaggtgttatcttgtatctcattttattagacattcctaaagggatgaggggacagacaagaaaccaccaactgtgttgaggtcacactaatcacagccaattttttgtgatccaaggaagggcctatccagtatttaacggggaactttatttttgatgcctcctttgggactggcaagatataggctctgggggatcagaaacgaaagagatgcaaacattcctctcataatactcagcacttacttagataggtgcaaatgtcaaatgtcctgtcagggatgtagggaactgtaacttcaggccagaggacatttcagttcaattgtatgaagattaagcttaaaatagtaataagaatatcaaaattcactttggttttatgtatccatcacatagagatcagcagagaacacccatgatctgttgaatcatcactcactgtagttgggtcaactagaaatcagctcagatgatagtgctgagtctcagagacacagagatctcaccccgtgtcacagagttcagggaaatgggcagattcaaaactaaatggtccgtctctgaggcccaggcactacccttcttcattattgttcagctctcagaaagtcttaagcagaggtgggaggtcttaactacaggcacttctggggtgcatttagaaacgagttccagcttcctgaatagaaatggagccaagaccctgattttatgtctcctttgaggaggtggagagctgcaaggaaagccaggaacgggggaaagggagagatgcaccctgaatgatcctgtgccagttctttctgggatctttgatgtgatctcagctgccctttctatacgtgatactatgaatgtagcaccctctagtctagctgtggtctaccaggaaccccccaagggaagggcacagtgagcaagggcatctgccaggactgacagggatttgagagggcaggttggactcagagagaggcctggcccaatgccatgtgtctggacttagacggctcctttcctattctataattaagaataatgcggcaggtataattcagggaagactaagcagatgaaagagaacaggcttcatagaacatcaagaagtcctcagtaaaagttcatgatagcctggtgaccatcgtcttcctcctcatcctcatcatcaccttcataatccttttggcatgcttagggaacacgctattacgagtgagatgtctttgggaagttgaaccagtgtggaagaaaagttaaactttgaatgagatttctgagaccaatcacaacccagaacataaactccacggtcgtctgagctgacattttgcacgtgggtttcctcccatctgccaccccactgtcctgtttgtcctgaggatgaggaaacaaggctcccgaccatccctcagcactcactgagctgcgcttcccctctgctgggccatgaccacggagagcaggtccgccgtcctccctgtgtggtgcacgatggaggctcaggctccgtcctcaggactggcaggaagacagggtcagacatgagcctcctgatgcagacgacaggtgtggagcccactggactggaagctcacactgcagggctggaggcacaggctgagtatttactgtcctatggccttgggggctcaaggcacagagctcctcattagccaaactggcccaagttccccagtctttaaggacttcctcattaatgcaagataaagcagaaaaaatgaacgtccccaggaacttttgggctcttcctctaatgaggagaaagcttgtgttcatcgttcacttctttcatttctttttctttttcaaggatgcatcttttttaagttttcatatttttatcctggcaaaatgtaccacattcaatataaaaattataaatataggtttatacaaaatggtaagtaacattttaccatttatcctcttcaaaatggtaaccaataccattttaaccacttttcactgtacagtttgctggcattaagtacatccacagtgttgtgcaaccaccaccgtcatgcatcaatatatttctctttcagaacagaaactcctgactgcaagcaatccacccagcttggcttcccgaagtgctggcattacaggcgtgagccactgcacccggccattctgtatgctcattgtctatttgtttatcttctttagagaaatgtctattctagtcctcttgatggagcagttaactcccattaatatcaagcaatggattgttcaatacttcattatgcaaaaataaataataggtttttttttattttaaaacatcaagcaacagggccacagagtggcagttaaaaaaaaaaaaagctactgttgtttcaaccttcaatcggaacacagagatccccatattcttgtcatcagaagctactcatggagtccagcccacactcaagaagaggagatgacactcgggcatgaaaactaggagggagggacccttggaagggtcttaggagccacccgcaggcttcatcttctatcagggttttgtactctaagcacagcaacactctgcagatatccagcataattcccaattcatcacaccactatgatcacaaccaaaaaattccaaaaaaaaaaaaatgtctggaaggaaaaactggcacttgggcagaacttcttctacattgagtacccacctgaccaagcagtgcacagaagcctccctggattctcttacccctgtagagtcctgccattgacatcaggccaaccagcagccactctatgcctgagaacaacaaatctcccctgcagcttccgatttccactcagttatcaagggatcatcttgccggtccacaatgtgtcatcattgtttttctttgtgtttacagcttggggactgcccttcccattagtgcatttccctgacattgcccaagatattatgggtatttcaagtttcaagatttcagtaatgcaccgcataaggatgtttcaatgaccagactacatacacagtggtggttccgtaagattttaagggagctgaaaaatccctatagcctagtgatgtcttagccattgtggcatcataatgatagcagtggctgctgccatcaggccagctgcagcagagaaggggcagctggggctgcaaactccatggagccagagggagccccgcccaccccttatgagctggagctggagctccccaggtgctgttgcagccgcccaatccatggatgcagacccaggcctccggctccacagagcaggcaggagcctgtgctctcctgggtggggctacagctgccccatctggctgtggttccgagcctccctgtgctcttggaggcgggcaggagcagacaggatctgctctcccgggtgcagctgtagccgactgacccacagctgcagacctggggctcccactccacggagcaggaaggagccagggacaagtgggagccccaaccctcccgagttggcatggcaggagctcccagggtgtagctgccactgccctcccaggcacaggacccaggcatatctgcagcctccaccctcgggggcctgggaaggaccctccaatcactgcaggcttggcagtgtctgctcccacagcctggcctctttcccttctggtgcctcctccagtctcggagaggggttgggaccagctctggggccataaatggcagtgggatacagagttctggataaaagggggcaggtccccagtaagaccctaccttcaggccatggaaggcctgaaggctagacaccatgatgccagtctcacggatggagtggggacttgtagtgcctcctctggcccacccatggctgcccgtggagcgatcagcatgtgcttcctcccctctgaggtccataaaagccccgggctcagccagagcagggcagaggatggagagatgaccagacgacctgttagcagggaggagccaccctctccagggccccatctcagctgagagctgaacacttcaccagaagacctgcctacagagagcagttacccactgtgggtctcctctaagctgttgtaacactcaataaagctcctcttcatcttgttcaccctccagttgcctgcgtacctcattcttcctggatgcaagacaagaattcaggcaaaggcaccactggccacagagctttccagacagaaaagtgaaaccctaaagatcccataacaataacacaatgtattccccacgtttgtgatgatgcttgtgtaaacgaacctactgcactgccagttacataatactgtagcacatataattctaggtagtatgtaatgcttgacagtcatcataaatgaccatgttagtgatttatgtatttactatactatacttttaatcattattttagagtgttgtccttctattttttattattttttaatttattttttattatacttttaagctttagggtacatgtgcaaaatgtgcaagtttgttacatatatatacatgtgccatgttggtgtgctgcacccattaactaatcatttacattaggtatatctcctaatgctattcctccccgctccccccatcccatgacaggccccagtgtgtgctgttccccatcctgtgtccaagtgttctcattgttcaatttccacctgtgagtgagaacatgcagtgtttggtttcctgtccttgcaatagtttgctcagaatgatggtttccagcttcattcatgttcctacaaaggacatgaactcatccttttttatggctgcatagtatttcatggtgtatatgtgccacgttttcttaatccagtctatcattcatgtcgtccttctatttttatattttaaaaaattaactggaaacagcctcaggcaggtccttcaggaggtattttggaagaaggcattgttgtgatagatgacagctccatgagtggcattgagaccttccagtgggacaagatgtggaggtgggagatgttatattcatgctcctgaccctgtgtatgcctgggctaatgtgtgttcgtgtctttattttttggtgcttttttttttgtagggactgtgtctcgctatgtggaccaggcaggtctcaaactcctggccacaagtgaatctcttcctggctctccaaaagtactgggattacaggcgtgaatcacagctcctggctatgtgtcatagtttttaacagaaaaaaattttaactaaaaaaaaaaaatcttaatagaaaaaagttatagaataaggatagaaagaaaataacttttgtaacagctgtacaatctgtgttttaagctaagtgttattacaaaacagtcaaaagccttttttaaaaagtgaaaatgttacagtaagcaaggttaattgattcttgaaaacagaaaaatattttttacaaatttagtgtagcctaagtgtacagtgtttctaaagtcttataatgatgtacagtaatgtcctaggccttcacattcaccccctactcaacgactcacccagatcaacttccagtcctgcaagctccattcatggtaagtaccctaaacaggtggaacttcttttgtcttttagactgtacctttaaactatattttaactgtaccttttctatgtctagatacacaaataccattgcactactattgcctacagtattcagcacagtgacatgctgtgtgggtttgtagcctaggagcagtaggtcatagcgtagaaactaggtgtgtagtgggctctactatcaagttagtcttgattcctctttcttttttatttgtatttttgcgttttgttttgttttgttttgttttgcttttgagacagagtcttgctttgtcaccaggcttgtagtgcagcggcgccatctcggctcactgcaacctccacctcccaagttcaagtgattctcctgcctcagccccccaagtagctgggattacaggcgtccaccaccacacccaggtaattttttttgtatttttagtagagatagggtttcaacatattggccagcatgatctcaatttcttgacctcgtgatctgcccacctcggcctcccaaagtactgggattacaggtgtgagccactgctccgggcctgattcctctttcaatatcattaccttctctgtgatctcacacgttttgagtactataaaggaaagtctttgtagcaatcagactcagctattctcttccaaattaaacatatgcaagtcatcaagacagtgagctttgatctctttgcagtccaaagtcctttgcagagtgtcatgttattgatttaaactagcaagacattgggtaattccatcgccaaaaccatatatcagttggtagaaatttgctatgaagtgtggaaagtcattgatcgtgtcaaagaaaaattacatcacatggggtcaagctggcaaagaagactttattcaagacaattgcaataagggtcaagactattgccttagggaggccaggcaatgtggctcacgcctgtaatgccagcactttgggaggccgaggcagatggatcacaaggtcaagagattgagaccattctggccaacatggtgaaaccctgtctctactaaaaatacaaaaattagctgggcatggtggcggatgcctgtagtcccagctactcaggaggctgaggcaggagaatcacttgaacccatgaggcagaggttgcagtgagtcaagattgcaccactgcactctagctcggcgacagagggatgctccgtctcaaaaaaaaaaaaaaaaaaaaaagactattgcattagggaaaagagattgaactcaactccactgaaacaaaaatgagaggattttcaaatgctggagtgagctaatggaaaagcccaggaagacgttagggaggaggttgtccagtgtgatttggccatgtgtgttcactaattgtcacttacagaaggctcctaccctcccaaagaagctgaaagatagggatgttgtttttattaataattacatttcaaagggatggcaaccaggtccttgagaaagagattcctgggttatacaactgggatgtggcagggcgtgatggctcacacctgtaatcccagcactttgggaggccaaagtgggatgatcatttgagccaaggaattcaagaccagcctgggcaacgtagcaagaccccatctctaccaggaaaaaaaaattagccaggcatggtggcctgtatgcctgtaatcccagctgcttgggagtctgaggcaagaggatcacttgagcctaggagttcgaggctgcaatgagctatgatcacgccactgcactccagcctaggtgacagagtgacagacagtctcataaaaaaaaaaaaggcatgagacttaaaaatgatttatctccctttcaagggagcagataaataatttgcaatcacaagttttttaaagtaaatgctctaaaaaaaggtcagggctctgtagtcaggaagaaacctagctcgttttgtaaagctgaggaaaacgttaaagccatcttagtccattgaaaatcagaattttcaaaactgttgttccaactcttgaatatttaaacatagcaccgttaactgtcatagtaaaacagaggtgttcttgttgttgtcattgtcgttgttgttgttttgagatgaagtctcactctgtcgtccaggctggggtgcagtggcgcaatctcactgcattggatgatgatttgcagcatcatccaaagacacatatccgattgcttcttgggacatccctgcataatctctccttacaccaaggtattcactgcaaccaccgcctcccaggttcaagtgattctcctgcctcagcctcctgagtagctggaactacaggtgcacgctaccacacctagctaacttttgtatttttagtagagatggggtttcaccatattgaccagcctagttttgaactcctgacttccagtgatctgcctacctcagcctcccaaagtgctgggattataggcgtaagccaccgcgcccagcctaaaacagaggttgtatatttttttttactagtatcttgagttccaagctcaaatgacaacactaaaagtgagaggcaaggtaggctatcaggcagcaagtctaaaatggtaaacagggtccatgacccacagagatttgtggtgatggcaacagattgtaggtgagcagacatcgagtgtattgtttgacctacatatccaaaaatatcatgatcaagtcagcagaagtcagatgtcagccaccaccattgaaaatcatgattcttctactagttttcttgttttttaatgatcactgcacatttaatctttaaatatgtacattaggccagacgcggtggtttatgcctgtaatcccagcactttgggaggccgaggcgggcagatcatgatggcaaaagatggagaccatcctggccaacatggtgaaacctcgtctgtactaaaaatacaaaaattagctgggcgtggtggtgggcgcctgtagtcccagctactcaggaggctgaggcagggaaatagcttgaacccaggaggcagaagttgcagtgagccaagatcgcgccactgcactccagcctggcaacagagtaagactccgtcaaaaaaaaaaaaaaaaaaaaaaggacattaaacatcatatttgggttttatttaaaaacttcatttttgtgccttgtttcataatacatacttatagtttaagtgtttttctattgtaaaatgacatgactttcttaaggaccacatggtgtaatagcaaattgaacttgtcttctaccagttttcatactcaagcctgttttcagatttagagcattgaaattgaagagttgctgggctcatctttggatgtcagtatatggcctctaaatagtcatattcctcgaggaccacatggtggcaagttgattacatcagacactttgcaccccagggtaggcagcaattcatctttactgagatgaatatttatttatgtacttacgtttgcctttcctgcccgcagtgccttggcaaacagcatcatccaaagacatattatccaatttcttgttggaatatccctccataatctcaccttacaccaaggtacttgttttatggtggaggagatattaaaatgaacatttaggaagagatccagtagtcctaatggatttgcagcatctgaagctgctcagcactatatacctagattctggcaactctgtgattcagttctcactctcctgaatcataagctagtgctcgctgctggcaccatatttgaagatgtttctacattcagccaggtgctgttactgtctaaactcctgttttgggcctctgtgaattcacctgcaaaattaggcaactagacaaaatacagcacgatcagacctaaaattctgggcagatggtttgtctgtttctggtgatacattttcttttttctttcttttttttttttgagatggagttttgttcttgttgcccaggctggcgtgcagtggcgctatctcgcctcaccacaacctctgcctcccaggttcaagccattctcctgcctcagcctcctgagtagctgagattacaggtgcgggccaccacacccagctaattttgtatttttagtagagatggggtttcgccatgttagtcaggctggtctcaaactcctgacctcaggtgatccacccaccttggcctcccaaattgctgtgattacaggtgtgaaccaccgtacccggcctttttttttttttttaagcagggtctctttctgtctctgaggctagagtgcagtggcaccatcacggcttactacatgctcaaactcttgggctcaagtgatcttcctgcctcagcctcccaagtggctgggactataggtgaacactacaatagctggcttttttttttttttttttgagactcttgacctcaggtgatccacccacctcgacctcccaaattgctgggattacaggtgtgagccaccacgcctggcctattttttttttttttttttgtaaagaaagggtctccctattttctttattttagaggctatcaaagcttattttagaaatgtactaaacaaacatatggagaaatgttcaacctcactaataaggaaataaattatttacccatcaatctattttaagtttgaacatacaacatgatctgataacattctaagattgcagatttaactctatggggcaagaatttattttcacttctgtatcccaggcacctagaacagcctggcacactataaggtccaataaatactgtcaaaggattattgagaaaggtttaagaaaagattgtcaaatgaatgaacttgataagagctagctagcaatggttaatggtaaaatgaactatttcataacttttatccaacaatgtctgagttaagtacttaaacttgttgtattaaccctcaggaatcaacacaaacaaatctacaaacaccaagctgaggtgcaatcgtggaaaatgtaagaggagatgaaagggtagaactgaaggataacagagaagtctctttgtataagactcatacaaagtactcacagtactcacaaggtaatgttgaccaaaggcagagaaacagagaaacaaattccatgagattaagaggcagaattttttttttgagacattttactatctttgttgcccaaactggtcttgaacttctggtctcaagtgatcttcctgtctcagcctcccaaagcactgggattacaggtgtgagccactgcgcctggcctacaggcagaatttctttagttgctgttgtttttgagacagggtctggctctattgcccaggctagagtgcagtggcatgatctcgactcactgaagcctcagcctcctggactcaagggatcctcccacctcagcctcctgagtagctgggaccacaggtacaccaccatgcctggctaaattttatattttttttgtagagacagggtcttgctatgttgcccaggctggtccagaatttctttagctcactgctgctacctctgccaactcagaagcccaggaccaatgtccccgtcattgagcatacagcattctcccaagcagtgtttctagggtcctcttgatgtccctgttccgcaagcaatagatgaaggggttcagcatgggggtgaccacagtgtacatgaccgaggccaccatgccccaccaggaagaggacgatgcattggaactaagatacacaccaaggcctgtcccatagaataaagaaaccacaaacagatgagatccacaggtagaaaaggctttgtgtttcccatctgtggatgagattctcaggatgtaggagacaatttgggtgtaggagaaaaggatccctgagaagggcacaaagtccagaaggccggccaccacgtagagcaggatgtaattgacatgtgtgtctgagcaggtaagcctgaggacctgagcaagctcacagtaaaagtgctgaatgactcaactggtgcagaaggacacccgcagcaccaacagactctggatcagggagtatgacaagctgaggaaccaggacacaagaaccagcaggccacagaggcaggggttcctggtgacacagtagtacagggggtgacagatggccacataccggtcataggccatcacggtgaggagaaatgtgtccatgcctccaaaaaccatgaaaaacatacatctgggcgatgcagtctgcatagctgatggcattgctctgcacctggatgttcaccagcatcttggggactgcggtggaggtgaaaccgatgtcagccagggacagattggagaggaagaagtacctgggggtgtggaggtgggagtcagagctgatggccaggatgatgagcaggttccccagaacggtgaccaggtacatggacagaaacagtgcaaagagcaactgttgatcctctaggtcttgggaaaatcccaggagtaaaaattctgaaactcttgtttgatttcccaagtccatgttgctgacacatcagctagacagttaaggaagggaagaaacatgaaatagatgctgaacaggctccaaaatctctctgcttttttatttcttgaggtgaataattggatacaaaagctttaaaatagcaaaacttaggaatcctacattctgtcatttgttataggcaacatttcataacgttgactaacccctgttcattggcctctcagaggcttacccattccctttttctctgctttagaatcatcaaatctaccaagagcaactttagaccttagagataaaatggtctgcacctgctctaacacatataaggttcagtgaacttaagaaaaggtcagggtcatcttccttgtctaagacacaactgagactgaagaaggtcagacaactatgtctgagcagtgagaaaatatgaaagcagagataatagctagacaaaatattgcaagatgagtggatttaggttttcaaggaaggaaagaggaagggagggagggaaggaggaaggaagggaaggaaggaaagaaggaaggaaggaaaggaagaaaggaaggaaggaaggaaggaaggaaggaaggaaggaaggaaggaaggaagggttacttgttgccttaagtcccacttggaattatggtggcagccaaattctgattcaaataggtcatgacattaccagtaataacattcatcttaagaagctgaccgcacattaaaaactttctaccttagaaccagggtttcaaaattagagaccagaaagatacagtcatttgacacttatatgattctctttttccatccacataataaatatgtcctaatctgtttctagtgtctagtgttggtgcacaattttttttgttgttgttgggtttttgtttgttttcttttcttttgagacagagtcttgagctgtcacccaggctggagagttcagtggcgcaatctcggctcactataacctctgcctcccgggttcaaacaattctcctgcctcagcctcctgagtagctgggattacaggtgtgcaccaccatgcccagctagtttttgtaaaaatacaaaactaactagctagttttttacaaaaactagttagttttaccatgttggccaggctggtcttcaactcccaacctcaggtgatctgcccacctcggcctcccaaagtgctgggattacaggcatgagccacagcacgtggcctggtgcataatttttgttgagccgtgctgggaagtacagaagaattgaactaggttgacaactaggttgtcagtcactgaaaaagtgctaacagccattctgcaagagggtcttctttgggccaggctaagtgttagctgttggggatacaaagattaatgatgtggtcttttttttcttatggttccaccttccagaagatggattcagaaacagatcattgtaacacagtgaattaagtgctaaaataaaacgatgtacagagtggagtacagagaggaaccctcaatccagcctggagtaatgcattcagggaaggagtcctggaggaaggaatacctgggcaaggagttacccaggtgaatggttgcacaggggcatttctggcagagatataagcaagggaataagcctagaagcaagaagcagcatgggacagagttctcttagccctttgctgctgcttaagtacaaagtgttagatagaaacgatgaggatgatgttggagaggtgggcagggatgacatgtctaagaactttgaaaagtataatccataaaggatggggctgtgaaggaacggcaatcaaaggagtaacatgataggaattgcaattctccctggggcctggagggaaagatggatttagggcaggcaaaactaaggataagggaacagggttggggattcttcatatcattggaattgaggggaacaactcaggaatatttttgcagaagaaatacaaaggccaggagaggtaaaggaatgaggtcaatgtcttgctaacaatctcagcttaaggatgagacttgaccttcaagtgaaatgaagggaattatggaaaagaatcctgcaggtttcaatgcttccctcgtgttccccagaggatacgatgtcaagaggagactggatgttgggcttgcctgagcccttcactttccctcactcacccatcgtaccctagttgttatacaccatggccttccattccagggaacacagacgcttgtctcttgaaggtgtctacttagaatcatggataagggtaaagaaggatggggaaggataagtctttctggagaggcaggagatgtttccaagcaagtgagggtcacagagaagaattcagagaggcttgatctaggctgagggcctctgaagttcttgggtcaggtagtaggtgaaaagaactagaagtgaccaggacttcactgcaaggcacctacagctcctactgaaacctgcaggattcttttccataattcccttcatttcacttgaagtcaagtctcgtccttaagctgagattgttagcaagacattgacctcattcctttacctctcctggcctttgtttttcttctgcaaaaatattcctgagttgttcccctcaattccaatgatatgaggaatccccaaccctgtttccttgtccttagttttgcctgccctaaatccatctttccctccaggccccagggagaattgcaattcctatcatgtaccttggagcatccatttgtacaatgcagattggtcactccaagaccacacagagtgatccagggcagcgctaagatatcaaacagtgccccaggccaacaaagagtagcccttcctataacctccatcagtcatctacccaagtaatatacaggcaaagttaaagctcgctatacaatggctatttaagcaagtagtctagccattctcccttccaagaaatcagcctcaacagccccttctccgtggacatcacagggtttctcctgccctatgattaacaagtcaatgcctttcccctcaatcatctcttttccctatttccctcaacacttactgagctatgaaggtttgacaatgtggacccaccacaggagccaccttgtgtccagaattggtgggttcttggtctcactgacttcaagaatgaagccgcagaccctcgcggtgagtgttacagctcttaagtggcgcgtctggagtttgttccttctgatgttcggatgtgttcggagtttcttccttctggtgggtccatggtctcgctggctcaggagtgaagctgcagaccttcactgtgagtgttacagctcttaaagcagcgcgtttggagttgttcgttcctcccagtaggctcgtggtctcgctggcttcaggagtgaagctgcagaccttcgcggtgagtgttacagctcataaaagcagcgtggacccaaagagtaagcagtagtaagatttattgcaaagagcaaaagaacaaagcttccatagcttggaaggggatccgagcgaggtgccactgctggctggggcaacctgcttttattctggtatctggccccacccacatcctgctgattggtagagccagtggtctgttttgacagggtgctgattggtgcctttacaacccctaagctagacacaaaggttgtccacgtccccactaaattaactagatacagagtgtccacacaaaggttctccaaggccccaccagagtagccagatacagagtgtcaattggtgcattcacaaaccctgagctagacatagggtgctgattggtgtgtttacaaaccttgagctagatacagagtgccgattggtgtatttacaatccctgagctagacatgaaggttctccaaggccccaccagagtagctagatacagagtgtccattggtgcattcacagaccctgagctagacacagggtgctgattggtgtatttacaatccctgagctagacataggggttctccatatctccaccagactcaggagcccagctggcttcacccagtggatcccgcactggggctgcaggtggagctgcctgccagtcccggtgccgtgcgcccgcactcctcagcccttgggtggtcgatgggactgggagccgcggagcagagggtggcgctcgtcggggaggcgcgggccgcacaggagcccatggagggggtgggaggctcaggcatggcgggctgcaggtcccaagccctgccccgtgggaaggcagctaaggcccggtgagaaatcgagcgcagcgccggcgggctggcactgctgggggacccagtacaccctccacagccgctggcccggttgctaagcccctcattgcccgggccgggcagggcaggccggctgctcggagtgcggggcccgccaaggccacgcccacccggaactccagccgggcccgcaagcgccgcgcgcagccccggttgccgctcgcgcctttccctccacacctccctgcaagctgagggagccggctccggccttggcctgcccagaaaggggctcccacagtgcagcggtgggctgaagggctcctcaagtgccgccaaagtgggagcccaggcagaggagtcgcggagagtgagcgagggctgtgaggactgccagcacgctgtcacctctcaacctcccctgaatcttgttgtctcgtggaagtaggcgatgaagacagaagctctgccccccaaaagagcagggagacagagcccggcaggtggtacgcggcctggatgatttctcctggagaacgcatgagtgtcttggaccttgcgcctgggggcctgggtgactgtaagtagatgaattgcatgttgggccctggggtggtctatcccctctgaagcttgttagacaaattggtcaatggcgtattcattccctgatcagtttggttcctcatgggcagggactacacaggaagaggtctctgaacggccaattccttattcttgggagactatcaatggggccagctgtgactcccgtctcctgtacctctcctttgggaagaatcactctagtctactttgaatcacctttggtgacaactgtcagcaatttttttttttttgagacagaatctcgctctgtcacccagcctgaagtacagtggcgaaatcttggctcattgcaatgtctacctcccaggttaagcgattcccctgcctcagcctcccaagtggctaggattacaggcgcgtgccaccatgcccggctaacttttgtatttttagtagagatggggtttcaccgtgctggcagtctgatcttgaactcctgccttcaagtgatctgcccatcttggcctcccaaagtgctggaattacagtcgtgagccaccacacctgggcagcattttctgacttgaggtttcctaattaggcagatagttgggtagcaaagggtcccaggattcacaaaaaggtagtggttctcaaaagggagcccgcaccagatgacctcaaggacttgtttaaacacagattgctagaacccactttcaagtttctgtcccagtaggtctaaatttgagtcataatttgcatttgggacacattctagatgtgatggtccccaggacaatctttttgggaaccagtgtcctggggcagtgcttcacaaattgagatttatcaaaggtataaagaggggatcttgtgaacagatagcttcctaccctatcccagacttaccttgccaagatctccaaaggaagacctaagagtctactttaaaaaaaaaatactatagttttttgtttttgtttttgagacagggtcttgctgtgtcaccacggtggagtgcagtggtgtgatcacagctcactgcagctttaacttcctggggtcaagcaatcctcccacaacagcctcctgagtagctgggactacaggagtgcaccaacatgcccagctagtttttacttttctttttttttttttttttttttttttagagacagggtttcaccatgctaccctgggggatcccagggtaatagcttcccactctatcccagacttaccgtgtcaatatctccaagggaggacctaagaatctactttttaaaaaaaattttaacagttggccgggcacggaggctcacgcctgtaatcccagcagtttgggaggccgaggcgggtgaatcatgaggtcaggagtttgagaccagcctggccaacatggtgaaaccccgtctctactaaaaatacaaaaattagccaggcgtggtggcacacgcctgtaatcctagctactcaggaagttgaggaaacagaattgcttgaacctgggaggcggaggttgcaatgagctgagatcgcaccattgctctctgcctgagggacagagtgagactctgtctcagaaaaaaaaaaattacaacagttttatttattaaagtttttattaatctaaaataaataaataataaagtttttattaatttttttttctttttgagacaaggtctcactcttgttaaggctggagtgcagtggcgcaatctcagctaactgcagcctcaaattcccgagcttaaattatcctctcacctcagccttccaagtagctgggagtacaggctgcgcccccatgccccactaattttttttatttttttgtagagacagggcatcactatgttgcccagactgtctagaatttgtggcctcacgtaattcttctgtctcagcctcccaaagtgctggaattacaggcatgagctaccacacctggcctttattaatatttttattgtggtaaaatatgtataacaaaattgaccattttaagtgtaagactcagcagcacattgccgggcacgatggctcatgcctgtaatcccagcactttgggaggctgaggtgggtaggtcacctgaggttgggagtttgagaccagcctaaccaacatggtgaaatcacgtttctactaaaaaaaaagtatacaaaaattagccaggcctggtggtgtgcacctataatcccagctactagggagggtgaggcaggagaatcgcttaaacccgggaggcggaggttgtagtgagccgagatcacgacactgcactccagcctgggcgacagagtgagactccatctcaaaaaaaaaaaaaaaaaggagactcagtggcactaggtacattcacaatggtgtgcaccattactactatccatcttccattctttttcatcatttctgaatggaaaccctatacgcatgaaataatacctcccattctcctctgcttccaggccctggcaacctctattgctccttctgtgtctatgaattccctgttcatgtttcctcatataagtggaatcatacaatatttgtcattttgcgtctggtttatttcacttagcataatgttttcaaggttcaaccatattgcttttatttatttatttacttttaatagcaatgtgggtcttactatgttgcccaggttggtctcaaactcctggcctcatgcaatcctcccgccttggcctcccaaagtgctgggattacaaacgtgagctatcatgcccagctccatgttgcttttgggatcaaatgcaaacaatcattactgaggccaatgtcaaagagctttttccctatatatattttttgagaaggtttatggcttcatgtcttacatttaagtttttcgtgcattttcaattgatttttgtatataagagtcaaatttcttcttttttttctgttttgcatacggatatccagttttcacgccaccatttactgaaaagactatcctttccccattgggtattcttagtgtctttgttgaaaaatagttgactgcacatacatggagttatttctaggctctctattgtgttccattggtctatgtgtctgctattatggcactaacatactgttttgattcagtagttttgtaatatagcaatgaaatcatgaaatgtgatgcctccaccttaggtcctctttttaaaatttttaatcaacaaataataattgtatatatttaaggggtactatgtgttttgttatatgtatacattatggaatgatgaaataaagctaattaacatacccatcacctcacatactagacaggaacagaaagataaacactgtgtgatcaggagctaagctatgactacatgaagacataagaatgatacatgggactctggggacttgggggaaagggtgggaggggtgagggataaaagactacacattggttaacagtgtacactgctcgggtgatgggtacaccaaaatctcagaaatcaccgctaaagaacttattcatgtaaccaaacaccacttgttccccaaaaacctattgaaataaaaatgataataaatactgcatgatctcactgatatgtggaatcaaaaaagtcaaactctcggcagcagagagtagaatggttgataccacgggctggaggatggggtggagaaatgggaagatgttggtcaaagggtgcaaaatttcagttagacaggaagaaaatttctggacattgattgtactgtatggtgactatagttaataataatgtattgtacatttgaaaattcctcagccgtggtggctcatatcatgcctatgatcccagcactttgggaggctgaggcggaaggatcacttgaatccaggtcttccagcctggacaacatagcaagaccccatctctacaaaaaaaaaaaaaagtaaaaaattagtcagttatggtggtgtgtgcctgtagtcctagccacttgggtggatcacttaagcccagaagttccaggctgcagtgagctataatcacaccactgcattccagcctgggcgacagagtgagaccctgtctcaaaataataataaacactaattttcaaatattcaccataatcccatcaacaattgtatttccatatcctcgcaatctaactatagcccctgttaggactccattaccagtcttggaaccagagtacatgaggctcccatgtcaaggagtcccagaaaagtcttttctctacctcctgaccattttatgcacttgtgtgaatatcaccttgtgttaccagccacgtttctactaaagaaagtatacaaaagttagccaggtgtggtgtgcacctgtaatcccagctactcaggaggctgaagcaggagagtcacttgaacccaggaggcagaggttgtagtgagctgagatcatgccactgcactccagcctgggtgacggagcaagactctgtctcaaaaataataataataatagtaataataataactctttgggaggccgagacgggtggatcacaaggttaggagatcgagaccatcctggccaacatggtgaaaccctgtctctactaaaaatacaaaaattagctgggtgtggtggcatgcgcctgtaatcccagctactcgggaggctgagacaggagaatcccttgaacctgggaggtggaggttgcagtgagccgagctcgcgccactgcactccagcctggagacagagtgagactccatctcaaaaaaataattaattaaataaaataaaaataaaataagaacttaggatagtggaagaagtgtttctgatcccacagaaaggatatagtccctgcttccaccccagccatgctagtatcacttcctatatgcatttctggtgatactgagtggctttaatttacagccaatgttgataatccatctgcccaaggctaaacatagactggttcttattccttattttttaacacctttcagatttttacatattagccaaaaattttatgattgaggaagataacagaaacacaactaattgagaagcttctctgggtactttgggcctcttagagtggggtgctgggttaagtcttatcgcatttcaaaagacttagtgtggatagtgaatttgaagacagaactgaccagaatactgtgtcccacatatcctggtagcagaacacttagatatctgtactcattcattttacaaatgtttgagtcactatgaggtgtctgtcaccataaaggaaaggaagcaatccaggactagtcataaatttgagttggaagtacagtgtcatttataagggtggaacaggtatgataagggtagcttgctaaagaaaagttctatttggggcatgttattttgaagatgattatcagccatgcaaatatatgtttggagctcagaggaggagtctgagccatgatttgaatttgggagttgttagccaatgtgtgtatcagttagctattgctccaatgtgctgcctaacaaatgatcacaaaaatcccagaggcaaaacatcaagcatgttatttagctcacaaatctgggagttgatctgcattgggctccactgagccatttagctactcttgtgtctgtagcagtgccagaagtgctaaagttagcaaaccaaactacacaagcatgtttaaagcctctgctcatattttactgcttaacgttccattgcccaaaacaagtcacatagcaaagggcatgaatatacaaggagtgaggaaatgggggcattaattttctagaatgtggcagtgaaagtcaaagtacttggaccatgggatgaaaccaccttctgaaggagaaagaaaaaaaggatctattgaaagaaaggtcacaaacaggcatggtggcttacatctgtaaacctagtattttgagaggccaaggtgggcagatcacttgagcctaggatctcaagacgagcctgggcaacatggtgaaaccccgtctctacaaaaaaaaaaaaaaatagctgggtatggtggtgtgtgcctgtagtcacagctattcaggaggctgaggcaagtgggtcacttgagtccaggaggtcgaggctgcagtgagctgcgattttatagcacctttcagaatagttttcaacttttataagacaatataaacctaatacaaaacagacaagtatattatgataaaagaaatcacaggacaaccttctcatgaacatagacacagaaatacttttttaaaagtaacattgaatctagcaaaaatgaaaaggctaataaaccatatccaagtgtggtttattccagtaatagatgttgttttaccatatgaaaatcaaggaatatataattcaccttattaacagatttaagaatttttttttccagacctctcaggattgacaaggatttcttaaagactctgataaagactctctttatctagagaaggcactagataaaatctaatgtccattcatgatttttacaaaacaatcttgacaatccaagaataaaacagaattcccttaatttgataaaggttatttataaaaaacttctaggtagtatcatacttaatggtgaaatattaaacacatttccctaagttcagaaacaaggcaaagatattcacattcatttctgttcattattctaaagaaataaggcaagaaaaataagcaaaaaataaagtttagacgttaggtaagactttcttttattggtattaacaggattatatatatatagaaaatccaaaatccacaaagtattggaataaataattgaatttataaatgtcaccagctataaagtcaatatacaaaaagatattgcaattctacgtgctagccaaaaacattgaaaaacaaattaaaaatacaaagcaaaatatactagaaataaattaaacaaatcaagatttctacaatgaaaactataaaacactcttgagaaaagttaaagacaacctaggtaaatggacaattataccatattcatcaactggaaaactcgatattgtaaagatgtcaattatcctcaggttattttataaaaccaatgcaattacaggcatagtaccaaaaattcatttgtgaaaattaatcctgagattccaaaattaatttaggaaacatggggaacagagaaggcaagacaatcttaaagaataaaaaagttggaaggctttcactaccagatttccaaaaatattacaaagcaacataaattaagatagtatggtattgatgcaagaaaagacaaatgaaccaagaggcagagatcacctcagcaaagaggaaaccatggtctctttgataaatctatatacacacaccttgatcctacctcacacgctacaaaaaattattcaaagtagatcacagacctacataaaaaaacaataaagaatctagaaggaaacataggagagtagattcattatcttggtccaggcaaataattcttaaacaggtgtcagatctcaagttgatctttatgctcattaaagattaagcagcaatctttttttttttttttttttgacacggagtctcattctgttgcccaggctggagtgcactggcacaatcttggctacctgcaactccacctcctgggttcaagtgattctcctgccccagcctcctgagtagctgagattataggcacaggccaccacgcctggctaatttttttagtacagacagggtttcaccatgttggccaggctggtcttaaactcctgacctcaggtgatccgcccacctcggcctcccaaagtgctgggattataggcatgagccactgtgcctggccaagcagcaatctttagcaatctaaacacatgttaatggatgacacctgacctttctaaaatgctatctaggaactacctaaccctggctgagttcccagacttcacagttcccacttgctgctaagaccagcataacagctaacattaccactgcttttagatcctacctgcccactccttcctcctcccctctgcatatgccccaaaactgccaggactctatgattcagtcagtgcagactctaatccagtttctggataagaacaggcactaaccctaaacaaatgagagtattacattccccaggccagtgactagagtacagtgggcaagtgagccaatcagagccaacgagattcaattctgatcatcatattggaaccactcaaaaagacaatcactcttttctccctgagactttaagttgggaagaaagtagccagagtttctggggccatctatgaagagacaacctgcttggaagaaacactaatgcaggaggatgcacagccaagacagggagacagaattcaactagataacatttttttagccccaggatttagccatgtctgaagctcgttatacccaaggactttttagtaataaattatttaaaccaacaaattccctttaaagagtgaaaagacaagacagagattgggaaatgttatctgtaatgtatgtatatataatatacatattttatgtatatatgtaatatatgatacatggtttatacatatctatgcatgtgtacctagatatagatatacatacatacaataaaggacaagtaaccagaaggaaacctttcaatttttttttttttttaaaaaggaaccataagtctgggtgcagtggctcacgcctataatcccagcactttgggaggccgaggtgggcagatcacctgaggtcaggagttcaagaccaacctggccaacatggtgaaaccccgtctctactaaaaaatacaaaaattagccaggtgtggtggcacacgcctgtaatcccagctactcaggaggctgagacaggagaatcacttgaacccaggaagcggagattgcagtgagcaagatcacgccactgcactccaacctgggcacaagagtccgtctcaaaaaaaaaaaaaaagaaaagaaatcataaatggatgaaatgtttcaacaggtgccctcaaaaaaaaaaaaaatccaaatagccaataagcacatcgaaaagtactcgaaatcattacacatcaggtaaatgcacactgtctgctggatgactataatcagaaagagctggacaggtgtgtgaaacaactggaactttcatgcattgttttggggattattcgtggaatcgatattttttgaaaactgcaatacctaccaaaactaaatttaaagtctaccctatgattcagtaaattcattcctgagcatatagcacataccaagataaataagcccatacatctatcaaaagaacaattaaaagtcaaaccacacattatgttgagcaaaagaagtcaaaacacataactgtatatattgtattttaacatttggatgaaaatcaagaacaagcacaccaagtcaattatagtaagagtcaaaattgtggttgccctgtggagtaattatcactgagaaagaggatgaaggaacttcctaaagtcttggaaatgttctgtttaccaggacatgtacatacatgaaatgtcattaagctgtacattgaagattagcacacttcatgcatgttagtatatgtataataaaataaaaagtgattatggggaaatagtagagttatacttttaaagagaaaatataataggagggaaatatcacagtagtagattatacttttaaagggaaaatataatactgtagctaaaggtacctgaagcaattcatcttcttacatttaaaaaaaaaaaaaaagcagtaaaatctttcctgtttaaaggtgtcaagtataaatcttcctccattaaaacaggatgataccctgtggatgcttacctcaattaccaagggtaacttccctcactctccacagctcttgcttttgagacttgcgaacgtatttttccccatgaatagcatgacatgatgcgattggactgtgtaagaaagactgcaacataagcaaaatggcaatgccagagcttgctagaaaatccaagaagctgtatctggtgatagctttagagatgctgccttggaagacactgaggtcaagcaagcatttaatgtttggttttttatttcgttttgttttgtttttgagaaagggtctcactctatcactcaggctggagtgcagtggcatgatcatagttcactgcagcctcaaactcctgggctcaagtgatcctccagcctcagctccctgagtagctgggaccacaggtatgcaccatcacgtccagctataacattcagttttgagcaaatattgatcaatgagtccaacagtcagaaaaatgagctgaaaactagaggtcaccaggcctttatacatctgtctctctgtctgatggccccactaaacatagcataacagctttttcttcccttatgccttccaaatctcgtacaaactcttattttagacaagtctaacctagaactggagaaaaaagtgattctgggaaatgtagttaatgtaacacaatttttacactcaaaacactggatccaattcccagccacgagcaaggacaaagaataaaatataaaaatagtatattaaattaatttctgctgaaattactcactagacaataaaagcttttaatagtaaaaatttatcatctcagaaactctaacgtctcttagcaaaaaagaataggaagaaaaatattgagtgggcaagttccattatctgccatgtagactaaaaacaaaacatcaacaaaaatcaatatttggtttttggtttgtcaatattatattggtttgtcaatattataacgactacccatttaaagaacaatgaacattaattagaaaccacttttttaaaaaagaccactgctgcctatacagaaaaaatatttcgtgtcctccatgatccaaaagattttgtaatggaaatcatatttacatcagaaccaaaattaaagcacctcatactaaaaagtatgtggctagagctgaaaaggtaaatttatcaccttcaatgttcctatcagaaaacactggtaatcaacgagccagcattctactttaaggatgaggcactgatcttcatttctagtagagattttcttatacataataagcaatgttcataaaggctttagcacatgacttacatacacagggtttctctaaagtgtcctcaaatcttcaaaacgatgagcaacaatttcctactttcttacattcatagggtgtctccacagtatgagatctcacatgttgcctaggatctgaagctttgcagacattcccatattccttacatttatatgttttctctagtgtgagttttcacatgccttcgaaagtaggcaggacaaacaaaggctttcccacattccttacattcatagggtttctctccagtgtggcttctcacatgccttcgaaaggatgagggacaactgaaagcttttccacattccagacattcaaagggtttctctccagtgtgcattcttgcatgtacagtaaggtatgaagaatgacgaaatgctttcccacattccttacattcatagggtttttccccagtgtgcgttctcatgtggatcctaagggctgagggataaataaaggctttcccacatttcttacattcatagggtttctctccagtgtgagttctgatatgtactgtaaggtgggaggaactaataaaggctttcccacattctttacattcatacggcttctctccgctgtgagttcttaggtgttcggtgagggatgaggaacgactaaaggtcttcccacactccttacattcatactgtatctttccagtgtgatctctcacatgtgctctaaaggacgagggacaactaaaggccttcccacattccttacattcatagggtttctctcgactttgatttttcacatgtgtattaagggaagtgggaaggtagaaggcctttccacattccagacattcatacggtttttctccagtgtgttttctcatatggatacttaaggaggagggacaattgtaggctttcccacattccttacatttatagggtttctctccagtatgtgtcctcccatgtacagtgagttttgaggactcgctgaaggccttcccacactctttacattcataaggcttctctccagtgtgaattcttatatgtattataaggtgagaggaagagctaaaggccttcccacattccttacattcatatggcttatctccactgtgaattcttttgtgtttggagagtgaggaggaacaactgaaggccttcccacattccttacattcataaggcttatctccactgtgaattcttttgtgttctgtgagcgatgaggaacaactaaaacctttcccacattctttacattcatagtttgtctttccgatgtgaatcttcatatgtgccctaaagaatgaggaacagctgaaggctttggtacattccttacattcatagggcttctcttcagtgggggttttcatatgcttcttgaaacaagcaagaaaatggaaggccttcccacattccttgcactgatagggtttgcttccagtatgagacctgatgtgactcttaagggatgaatgatccacgaaggcctttccacactcatggcattcacaggattttacttcagtatttctcttgagtgaatcaagatttggaacttggctgaaagtctgtccatcttgattttcttcataacattcatagatgttctctaccatatgatttcttttaaaaataaaagacacattattagtaataaatttctaccaatttcagtgaatgtatatgttttctgcccttctgtcaagtttaagctgaaagttttcacagagggctctacgacagccaatactgtcactgagttattgactcacgggatttttctgataattgtttacaactgaagtatgtgtcaaacattcaaaatcccggtctcatttgtggaaaaaattaactcatgaaaattctttctcaaaccacaatctttgatctaggcttatttatatatacatatttcttaaatttcatgactttaattttaagattctctcctgaggcactttctctttctcacgaatggcactcacctcaaatgtctctcatggcttttgttctgataatcaataccacaggactcctggttttcatgtaaactggagaaccaggaatcattccttttgaatcttactattttctgttcattggatattttttctccacaaatatcttgtgaagcaactgattcattagttttaagttgagtctcaaaacctgaaacgaaaaaaagtgaaagcttccatgagccaaggacttttagcagagtgactatttcaggactttggtattaataggcacaagggtcaaaatggtaagcaattaactaagaaataattttatgaagattgaaactaacataactaatatagtattaggagaacaaaacagaaattggataaaatgcacatgaccaaatgccaacttacaaagaggaaacgtggaaggtctttgccaagaacaaggaaaatgcgagaggactgataaaaagtcaaaatagtcatctgagctatctgtggaagatgagcttcctcatataaaacaaagtttgtttttgttttttactttaagtttattttttcccccaaccaaaacagtttctcccaagggttcttgccttcccggtgctctcccataaagatgccctggataagttctctcttcactgtctgcaggtcctcctcttgttcccactgggagatcagatggggtgtgtgtagcggataccctgcacaagcagaaaggcatatcacgagggaaaataatgaagaatcactaacatttccatgaaacagaaacaaaactttagtcttctgatattccaaaaatggacaactgtgagtttaactgcaacaaaatgtcaaatttatttatttttttttttaaaaaaaggagaggtggcaggttgggtgcggtgactcacgcctgtaatcccagcactttgggagactgaggcaggcagatcacgaggtcaggggttcgagactagcctggccaacatgatgaaaccctgtctctactaaaaatacaaaaattagcagggtgtggtggagcacacctgtaatccaagctagtcaggagtctgaggcaggagaattgcttgaacccgggaggcggaggttgcagtgagctgagatcgtgccactgcactcccgcccgggcgacagagcgagactctatctcaaaaaaaaaaaaaaaggagaggtggcaggaggaagcagcttctgacatacagaactgatctaatgttcacacctaaacctcaatatcattacaagctggtcagacagtcacaactgggacattttgttctcctatagaatataaataatctcacaaaatactaatcttggataaagttactctgaaatcatgataaaatgaaacaaaacaaggttacctcataattttgtctaaagactttatgccacccacaacatactcaataatagagtattattgaataatactgtcagcaaccagcaatactatccactttctgtcagcaaccaatctaaaatgactgcctgtgtcactaggctgaacaacgtcccctcaaaatttatgttcaaatggatcaacagaaaagcacagtgggttcagaaacagagccacaccaatacagtcagctgaccttgacaaaatagcaaaggcaatacaatggagaaaagctaagtctttcccacaattggtactggaacaactggacatccacaagcaaaaaaataaatctagacacaggccttagacccttcacaaaagttaacgcaaaatgggtcacagaccttactgtaaaatgcaaagctagaaaactcctagaagataacaggagaaaaatctaaatgaccttctgtttggcaatgacattttaaattttttttcttttttttgagacggagtctcgctctgtcgcccaggcgggagtgcagtgccacaatctcagctcactgcaagctctgcctcctgggttcacgccattctcctgcctcagcctcctgagtagctgggaccacaggtgcctgccaccacacctggctaattttttgtatttttagtagagacggggttacaccgtgttagccaggatggtctcgatctcctgacctcgtgattcacccgcctcggcctcccaaagtgctgggattacaggcgtcagccaccatgcctggcctgacatttttaattttttttttaagagacagggtctcactttatcacccaggctgtagtagtggtgtgatcatagctcactgcagcctcaaactcctggactcaagtgatcctccagcctccacctcccaagtaactgggactaccagcgcgtgccccccacaccctggcaatgatattttagataataatgctaaagcatgatccataaaacaaagaatcaataattgagcttcattaacattaaaaatttctgccctctgaaagacaatgtcaacagaatggaaagataagccacagcctgggagaaaatatttgcaaaaaacatatctgagaaggaactgttatcaaaaatatacaaagactgtagcagatatcatacagaaaaaaacaaacaaaatattcaaagaactcttaaaactcaacaatgtttaaaaaaaaaaaagacaaaaaaatgagccaaagacctttacagacacctcaccaaagaacatatacagatggcaaataagcatatgaaaagatgctcaacatcataagtcatcagggaaatgcaaattaaaacaaggcaccactacacacctgttagaatggccaaaatcctgaacattcacaacaacaaatgctggtgaggatgaggagcaacaggaactctcattcattgctggctggaatgctcgctctgtcgcccaggctggagtgcagtggtgtgatctcagctcactgcaagctctgcctcccaggttcacaccattctcctgcctcagcctcccgagtagctgggactacaggtgcccgccaacacacccggctaattttttgtatttttagtacagatggagtttcaccctgttagccaggatggtctcgatctcctgacctcgtgatccacccgcctcggcctcccaaagtactaggattacaggcatgagccaccgcgcccggctggcagtttcttataaaattaaacatcctcttaccataaaatccagcaactgaattgcactccttttacccaaaggagttgaaaacttaagtccacataaaaacctgcacaccaatgttcatagtagctttatttgtaactgccaaaacgtgtaagcaaccaagaagtccttcagtaggtgaatggataaaccgtggtacatccagacaatagaatattagtcagaggtacaaagaaatgagctctcaagctatgaaaagacatggaggaatcttaaatgtatattgctaagtgaaagaagccaatctgaaaaggctacatactgcatgattccaactatatgacattttgcagaaggcaacatcattatggagacagaaagatcagtagttgccaagatttaagagggagggaaggagggatgaattgatagagcacacaggatttttacagcagtgaaactattctgtatgatattataatggtggatacatgtcattatatattcttccaaactcatagaatgtacaataccaagagtgaaccctaatgtaaatgatggactctgggcaatgatgacgtgtcaatgtagcttcatcagttataacaaatttaccactctggtgggggatgttgttattagaggaggctatgcatgtgggagccagaggttatacgggaaatctctgtaccttccactcaattcagctgtgaacctaaaattgctctaaaaataataataaagcctacaaaaaaaaaagagagagagagagagagagagagaagtccacccagaacctcaaaatgttaccttatttagaaatagggtctttacagatataatcaagacaaggttatactggattaggatgggccctaaatccaatgactggtgtccttataaggagacagagacttagacacacaggcaagaaggagaaggcagagaatggaatgatgcatctgtaagtcaaggaatgccaatgattgccagcaatcaccagaagccaggaagagaaaagggagtctttcccccagagccttcagagagaacatggccctgctgatcccttgatttcagatacccagcctccagaaatgctgtgaaggaaaaaatttccgttgtttttagccaccagtgtgtgatactctgctacagaaggtctaggaaactaatacagcctgcttccatagacccatccccaaatcactcaactgaagcacaaatcctgtaataggtcttttctaacaccatcttactaggacatgtaagaggcatgtattcttgcttgctgcactgcaaaataaacccaacttgtttaactataagtgtgttctggtagtctttgggtaaaggacacagatagcagtaaaatcctcaaaatgttcaaactacaaacctcctccctgtgtcctatagtgattgctgaggtttatacccacactttcgatacttaataaacctcaaggctttcaaccacgaaaaaaagcatcagttcaatatacagatgtttattttcttttttcttttttttttttttgagatggagtttcactcttgttgcccaggctggagtgcaatggagcgatcttggctcaccgtaacctccacctcctgggttcaagccattctcctgcctcagcctcccaagtagctgggattacaagcatgcaccaccacgcctggctaattttgtgtttttagtagagacggggtttctccatgttggtcaggctggtatcgaactcctgacctcaggtgatccacccgccttagcctcccaaaatgctgggattacaggcatgagcactgcgcccggcccaggtgtttattttcatagcaaagccactagactgtaagttccttggggtcagtgaccatatctgtcttacttaccaatgtcttcccattcctcagcccaaatcctagaataaagtcaatttagtgagataaaataactttctaaacaactacatgaaagaatcttgccattcttacctagtgaggccaggttctggaagttttccagcatcacatctctgtagaggtttctctgagcaagatccagcaaagcccattcctcctgggtaaagtccacagccacatcctcaaagactactgagtcctaaaacataccacaaattctgttcagaaaggtacaattcctccaatgtgtacaagaggacagatgaggctcacaacatcgaggaaatgagagtcaattcataggaagttcagaagatcccagcatctactctagggctcagtcaacaaatctctctctctttctatccacacataattcatcactgatcaaatcctggcttatagatttaatacttctaaaacactaaattgccaggcaaattgggtcaagcctataatcccagcactttggggagccaaagcaggaggactacttgagcccaggagttcaagaccagcctaggcaacagaacatagtgagaatcagtctctactaaaatttttttaaaaaatagctgggcgtggtggcatgtgcctatggtggcagctactccggaggctgaggtgggtgggaggattgcttgagccacaaggttgaggctgcagtgagcacgaccatgccactgcactctagcctggacaaaaaaaaacaaaaacaaaaacaaaaaaacattaaatttatctccccacaatctgatgccaatgagctaggaaaaaacaaagtgtttttcctaccctcttacatagtcactcaatactgtacagaacacttctgacaccagatgtgtgggggatattttccacaaacaccaagcaattccccagtggacaccagctgggtatcctacaacttgcttctgatactatctacctggagattccacaggttggagattccacaggaggtcccactaaactgcctcccacttcagatgccaatcccaagttaaaaggctgtcaattatacttctgactggctaaaatcagggctcctactaccctctccttgagtttgattaatttgctggaacaactcacagaactcagggaaacatgtttactggtttatcaccaaggtcattacgaagtacacagataaaatagccagatgaagagatggacaggccaaggtatgctgggaaggggtgcagagattccatgccctctcctggcatgccaccctccgggaaccaccacacgtccagctatccacgagctcctcaagccagtcctttgggtttttaaggaggctccatcacaggcatggctgatttaagtcccaatcctctgatcttgcctgggtctttctgaaccagcccccattctgagtctctctaggggcttccagacaccaaccatctcatgagcacacaaaagacgctcttattgctctagagattacaagggtttttaggaactctgtcctaggaaataggatgaaaaccaaattgttttcttttttttttttttgagatggggtctcgctctgtcgcccaggctggagtgcagtggcgcgatctcggctcattgcaacctccacctccctggttcaagcaattcccctgcctcagcctcccgagtagctgggattacaggcacgtgctaccatgcccagctacttttttttgtatttttagtagagacagcgtttcaccatgttggccagactggtctcgaactcctgacctcaggcagtctgcccaccttggcctcccaaagtgctgggattgcaggcgtgagccaccgtgcccagccccaaatatgtatttcacaatatcatagatggtgaccaatgccagtcttatgatggcctagaaaagtccagaacatattgaagaaatgagaaaaatgctctggaaatgaaataatttccacattgacatcatcgattccttattacagaaataacttcacctgttactttattcccaccatagcaatcactacaacattaaacacagggtcaaatctagatgggattttaatgaataaaaatacaccgagagaaaagcagcctttcatttttttccccctcacaaaactgagaggcccaggagactgcataagcacaattttgaagccaggcccacagctggtcatactttcttgtattctaggccagtggtcagcaaactatggcacatggactatatccaagctgccacttgaatgcataaatacagttttattggaacacaataaaatgtgtttatgtactgtctatggctgcttttgcaccaaaatggcagagctgaattgcaatagaaacactacggccggccgggcacggtggctcatgcctgtaatcccagcactttgggaggccaaggcggacagatcacgaggtcaggagattgagaccatcctggccaacatggtgaaaccccatctctattaaaaatacaaagttagccgagagtggtggtgcatgcctgtagtcccagccactcgggaggctgaggcaggagaatcggttgaaccagggagtcgaaggctacagtgagccaagatggtgccactgcactccagcctggcgacagagcaagactctgtctcaaaaaaaaaaaaaaaaaaactatagccttcagtgcctaaaatactatgtggtccaatacagaaagagattgctggcttgtgccctaaaacactgagggagacctggtacaatggaaatattcttttggacaattatcaccttttacttacctgtattctatttttctgtaactcagcagtttttctttcttcctccatgtcgccttcatgaagaaaagcaggatattgagaagttagaattaaaaaaggtgacatgagaatccagacctccccaaaattcccacactcatgagcctggatgttgcagcccatcaattataagtaacaactcccctcaaaacacatacacacacacacacacacacatgcacacacccaagacacccaagtaaatataccctgctcttgtgggaaagtggaacaaccttacgtccccctagagatacaaaacagtgctctggtccttgttgatcataaagaagaggttaagagtgctattttgtaagttaactgaagactagaaaagtctggctgtcaatctgcccatgataacaaaaagtataaaatgtatcagggagtatcttccaaaacatgaataaacactccccatctcaaattcaagaaagcactgatttatatgccaggcttctgggagttccactcccgatatttcttacttctgcaccccttggctggctaacaggctttgctgctcagccctagaccactgcccctgcccccatgagctgcagggttccccaaaacctgagaaagagcatcagcctattttttttttttgagatggagtcttgctctgtcacccaggctggagtgcagtggtgtgatctcagctcactgcaacctccacctcccgggttcatgccattctcctgcctcagcctccccagtagctgggattacaggtgcacaccaccatgcctggctaatttttctgtgtttttagtagggacggtgtttcaccgtgttagccaggatggtgtcaatctcctgacttcatgatccgcctgcctcggcctcccaaagtgctgggattacaggcgtgagccaccgcgcctggccaagcatcagcctattgaattccatatgctggaggcagagaaggccgctatgctgtgatacacatgctaaatctgcctgcacagtacagtagtagcagaataagaatacttggccaagcatggtggctcacgcctgtaatcccagcactttgggaggccgaggtggatggatcacgaggtcaggagttccaaaccagcctaaccaatatggtgaaacccctcctttactaaaaatacaaaaattagccaggcgtggtggcgcaagcctgtaatcccagctactcaggaggctgaggcaggagaatcgcttgaacccgggaggcggaggttgcagcaagccgagattgcgccactgtactccagcctgggagacagagcgagactccatctcaaaaaaaaaaaaacacttgacctgtgtcagccctgatgtggtatctgcagtgctgtttcacaaatttcaaacaacgacatgttaacagttacttccactgcagtggaacaagtagcattttaaaaagccaataaaaaactgtaacattctttgctgtattagtaacaatatatgccatctggacaaccctgatgtgagaatgactttgcaaagaaatggccacattttagaatatttctcacagaagctctgcaaatcaaatattattacaaccagtttagaattatcttagaatgagtcaattaaccacatcttcaatattacccaattagacagctgctgaggcagggtatgaatgcaggcctatttgtcttcaaaacccaaacacccagtgagtacatttttgaacacataccttaaattttaattgtttttaagccccttattccctagttttaccaggatttagcctagaaccctattgggcactacagagagtggacaaatgaagcattctaatcaaatatgctgtgcgtggtagctcatgcttgtaatcccagcactttgggagaccaaggtcgggggaatcacatgaggtcaggagttcaagaccagcctggccaaaatggcgaaaccctgtctctactaaaactacaaaaatcagccgggcatggtggcgcacagctgtagtcccagctactcaggaggctgaggcaggagaattgtgtgaactcaggaggcagaggttgcagtaagccgaaatcacaccactgcactccagcctgggcaacagagccagactctgtctcaaaataaataaaataaataaataatcaaatatgttatctttgagctccttttcctaaggcctatgtcttgggcaacgatgcttcccttatagcccttacctccttcgtttcatgtttatttaggtgacatttatcctgaccctactacatgaagtcacaaggaataaggcatagaaaaataaaaaagaaaaatcctgaagcaaatgaatgttataatattttgggtaagacattaaacaaaatacatcaggtagagatacatgctatataaaaaatgtagcacattatagggataaggagacacgtaacatatttatctttagcaagtcaggacaggtaatgtggcagggtagaagcagaaaattaaaataactatttcagatcatgctggaatttcagagggtttagtatatctattatatatttataagcattatcaactcctagaggaaaaaaaatcagtactggccaggcacggtggctcacacctgtaatcccagcactttgggaggccaaggtgggtggatcacaaggtcaggagttcaagaccagcctggccaagatggtgaaacccacctctactaaaaatacaaaaaaattagctgggcatggtggcaggtgcctgtaatcgccactacttgggaggctgaggcagagaattgtttgaacccaggaggcagaggttgcagtgagccaagatcacgccactgcactccagcctgggagacacagcgagactctgtctcaaaaaaaaaaaaaaaaatcggtattaataggctagactattgatatataaagttgaataaagaccagcataaaagtttagaaagaaaatagaaaataatcttttttaaaacatagtaaacaaaatcagaaaagctaaaaaagcatcctttgcaaaaagaaaaactaatgaaactgacaaactcagctttttaaaaaaattttttaatttaatttattgtttaagacagactctttatgttcccaggttgatctcatttcctaggctcaagcgatccatctgccttagcttcccaccagctgggactacagatatgcgccactgcagccagcaacagactcagcaattttaagagcaacagggcataaacaacaacaacaaaaaaaaaatgaacaagaattaatcataattacagatatcataaggagaatatagaaaaaatttaaggaataaatatgaagatgcacaggtaattaatgaatttctagaaagtagtacaactttcaagcagtgatctaaaacctgattacacccagtaattaaagaaaaaaaaatcagcggtttaaaacacggtcaggccgggtgcagtggctcatgcctgtaattccagcactttgggaggcggagagcccatgagttcgagacctgcccgggcaacagagcgagactcctattttctaaaaagaaataggaataaagaaaggaaaaaaacctacaaacacctacagcaaacatcctatttaatggtgaaatgatagaataattccctctggaatcagaaacaagacaggatgtaaattacatgctattctgtcggacattgtactggaggtcctggcaagtgcagtaaagaaatgaaaagaaatggaaactgcaaggaataaaaagggaaaagattgaaactgacagatgaccaaattttctgtgtgaaatttaaccaatctatagacaaatgattcaaatgcatcattaatgacaaaatgcatcagttcactttcacttgaatataatgtatcaaactgatgtccacaggcagaatataatatccagagaccaaatactatctttttgtttttttgagacagtgtctcgctctgttgcccaggctggagtgcagtgatgcgatctcagctcactgcaacctctgcctcccgagtagctgggaacacaggagagcaccttttattttacttttttttttttttttttttttggtagagacgggatcttgctatgttgcccaggctggcctcaaactcctgggctcaagcgatccgcccgcctcggccgcccaaagtgctgggattacaggcgtgaaccaccgcgcttggcccaaacactacctaatgcataaagaggggacaggaggggaccgagccgaggcaaatgtcaccccgtgctcacccgacacgccgcgatccacagatcagctcacagagaacgaggctgaagcgcttgtccttgagacacgaatggcagagatgctcttcctttctggaaagagagcaaaggatgctttcggaggctgatgaactacgacattggttctccaactctcgcctgcatcagaatcaccccgatttctgtacccagaccagagttcccgattcagtgagtttgggaccagccgcggccacaggggcagctgacccgggctctctgaggaggcgccgcggcggcgggaggccccgggcgcggggtccggacaaggagtggcggggaggcagcccttagaccgccgattcccaaacccagccctcggtctcccgcggacccgacccggggcaggcagggcggggcggggcagggcaggacaggaagcgggcggaggcaaaaatgttcctcagacgcgggcggaggcgtagggtgacaaggctgtcgactcgcgcatgcgcagaagcacacttctgattcctctttcggcgctgcaaatggcgtatggggcggggcctgggaagcgggacttgaggtgaagggggtggagcaggtaggagcgggatgcaaaggagcgccaaggctggttccagccgcaagtggatgagaaatcctagtttcttcatgatttggagtaaacagagaagaaacagaaccctgaactggacttgcatgactcggcctgaggggcggaactggggctagacctaggggcgtggccttttaaatactccaaggggcggggctaaaggtggaaccagattgggagcggggcttggtagaaattcctagggggcggagacgagggctgggcggggcttaagtgacaaggcctagggatggggctaaggctagggcttcccatccaggttctcagctaccacggatacaggatgctcatcgatcgggtttctacctatcctccacgttgctacagtcctgtacacaggacacatatatttgcagctctaataggaaacagactctccttgacactcactcagtccttttgggccttttagttttccctttcattgttgtattgataacttctcctgtagagggaagccattgataattatttaaatagaacctttttcctggaaacttgctgaattctgatagctgtcagtttattatttgaaccatcaaatataaatattttctctgcatattttcattgttttaatgtgtataactcatttctttatgtgaggcaatgtctcattctatcgcctagactggagtgcagtggcgcgaccatggctcactgcagccttgacttccccagctcaagtgatggtcccatctcagccccccaagtagctgagaatacagtcgcgtaccaccccacccagctattttctttatttttttgtagagatgggatcgcactatgttgctgaagctggtctcaaactcctgagctcaagctatcctctcacctcagcctcccagagtgctaggggtacaggtgtaagccaccacacccagagtcatttctttttcttattgtttgtttagggcttcctcaactataagtcggaaagaaattaagcattcttgtcttggtcggtaatgattaccaaagttcctcagtaagctgtttacaacaggttgcacctcttatcaagttaatctttttaaaccaggtttataaagatattttatcaataattttttatgaacactatcaaatgtttatgcaacaattgagttgataacataattttgctcctcttagtttataatatgatatccatataaaatatttaattttaggcaaggcgcagtggctcatgcctgtaatcccagcactttgggaggccgaggccggtggattacctgaggtcaggtgttcaagaccagcctggctaccatggtgaaaccccatctctactaaaaatacaaaaaattagctgggcatggtggcgggtgcctgtaatcccagctactcaggaggctgaggcaaggagaatcgcttgaacctgggaggcagaggttgcagtgagctgagatcgcgccattgcactccagcctgggcgacaatagaaagactccatctcaaaaatatatatattcaattttatatatccccaatgaatctatacttttagtaaaatggtttctgagtttcctagtttgcttttaaatgtctccccaaactctaaaatataaaaatacttcctaatttacttccaaattgtactgctttttaaaacgtataattctttactgctcagggaatgtattttggtataatatgaggtagagatgtgttatataagtgaaccacaggtggcctttctgtattggtccctaggttgttcattacttcttcactgcggcttgaggtcaccttcccaatgcctgtccctggtgccctagccagctccctttcatcatctatgttttttaagtgtaaatctttttctattatgaagcattatgttctcattgtagttttttattttaaaggaaaagtataaggaaaagacaaacaacattcagaatcccagcagtgtttgaattttctgtatttcctttctgccttctttgtacgcgtgggtggcaagccacccaggtgccaaggcaagagaccgagggcacaagctgttccagtataataaagaaaatatatagaataagagtagttatactagaaatagattatagatatgattgtatatatcattaatcatttgtagcattactctttattccaatattataataatctttgttctacaatcataacctaggaaaaaccaggccatacagagataggagctgaagggacatggtgagaagtgaccagaagacaagggtgagccctctgttatgcctggacagagccaccagagggctccctggtctagcggtaatgccagcccctgggaaggagcccgttacctagcggaccttggtctagcagtagcgtcagtgcctggggaaggcacccattgcttagcagacagggaaagggagtctccctttccccgggggagttagagaagactctgctcactacctcttgcggaaagcctgacatcagtcaggcccgcccgcagccatccagaggcctaaacgtctccctgtgatgccgtgcttcagtggtcacactcctggtccactttcatgttccaccctgtacacctggttctgccttctaatcagcagtagcggaattagtgaaagtactaaagtctttgaaatgcatagaagaaataatggcgtaagctgtcctctctctctctccacctcagctgccaaacagggaagggccccctgtctggtggacacgtgactcgcgtgaccttacctatcattggagatggctcacactccttaccctccctccttgtcttgtatccaataaataacagtgcagccaggcattcggggccgctactggtctctgcaccttggtggtagtggttccccggacccagctgtctttttgtctatctctttgtcttgtgtctttatttctatgatctcttgtctccacacacgaagagaaaaacccacagacccagtagggctgcttcctacagtacgcataacagtaggtttttttattgtttgtttgtttttgactcagtctcgctctgtcgcccaggccggagtgcagtggtgcaatctcagctcattgcaaccttcacctcctgggttcaaacaatcctcctgcctcagcctcccgagtagctgggattacaggcatgtgccacaacacccggctaattctgtatttttagtagagatggagtttctccatgttggtcaggctggtctcgaactcctgacctcaggtgatccacctgccttgacctcccaaagtgctgggattacaggtgtgagccaccatgcccggccaatcagaagtaatttcaatttttcatctgccatgcaaaaaaggtgagggattgcaaaggcaatagcctctggtccttttgttacttgggcatggaaagtggggtttccttttgatctagttctagaaagtcagcgtgattggccttaggttcccttcctctagaccctattctacctcaacactgaaacttggaaaggaagcttcttcctccttccttgtcttccagcaccctacactggtaatgggtaaaagagaaatatttataaggcccatctccattatcacaaagcagaaaaaaaggacaaatttgtagcataagtaataaatctataactaggacagtggtcaaagcatgttttgccttggttttcctttactgacagaccaggtcctagcaacaccaagaattggttcatggtatccagactgcttttcctcccaatttgtggcaggtcaattctccctgacaatcacacagacaggcctgcatgacagtcacacagacagacctgcacagcacttctgttacacagacaaatttccacaaaactgccttaacattgagcaaatagttaaatctagggaaatcagtgcccagacatcaaagctagaaatgaaacacatggtcagttgaagcttcacacgggcttctccctaacctggagcaagccaaaataatacagacagtcttacattcctagtaccagcacgtgtctcaggtggacgaaatctgagatgagtcaagataacagaggcagctgtttgaatagattcactggagagtctaaggcagctctctggacccaagctgtaaaggagataatgtgtccagagttggttcctgctggtgggtttgtggtcttgctgacttcaagaatgaagctgcggacctttgcagtgagtgttacagctcttaaagatggcatggacccaaagagtgagcaacgtttattgtgaagagcgaaaggacaaagcttccacagcgtggaaggtgaccctagcgggttgccttgctggctgggggggggtggccagcttttattcccttatcgacccctcccatgttccgtttctgtcctatcagagtgcccttttttcaatcctccctgtgattggctacttttagaatcctgctgattggtgcgttttacagagtgctgattggtgcattttacaatccgcttgtaagacaggaaagttccccaagtccccactcaactcaggaagtccagctggcctcacctctcaattatccctctaaacaggtcacccaacagctgttgggaactgggtgatgaccgctctgggctacttcctgccggataggggtgaagaaggggccctgcagttgtagtgtcctccagaggggaactctctaggccagtgaaagggccagtgggtcagtccaggggtcctcagtagaagttctgagttgagctcatttggggttccatttgtaagaccctctgtagcttgatggcctcgatcctggaggaaacaaatttgacaaggttgttaaaaatacaggacccaaaggcaagtaatagcaagatggctgtcctgagactgagaaaggggagaagccatgttgcccaactccagaggttggtataagagtttgaaaggcgttgtctgatttcagaagccttttcctgtaaacgataagcggcatctcatactatcccttactggttagtgtaaaagcaacactcttcccttaagaatgtacagtcctcctttctcagcagtgaggaggtctaggcctcagcggttttggacagtcactgccactaaagagtctatttgggattgtagagtaacgatagattttatttcttgcaaactgtttgaaaaatcttttgagagtgtgtggtaataggataatgaagtagataaactggctattccagttcctgtagcagtggccattcctaaccctataagttggagtattagttgtatggccctgcactgacaaacttgagctttgaggggcactgatagggtctgatttcctggggcaatgtcaatgttgggacttaggaagactaaggtgcaggtgcgtctccagttggtggggaggcagatataggttgaagttccacatgggaagaatatgccttggctgggtagacagaaatggttgtgtatgttaaaaaggcgtgtgagtttgttcttttcattttcccatactcctggagtacttgtcaaggtagctccagtgagcagctggaaaggggtattgggagcaaactgagtggctccctgtgttctattttcccattagagaaaaaaccattttgtatctactaggaaccattcaagagagtgattgaaagaggggatgagaaggcattcattagtggtgggggcgctgctgcaggggttccaggggtgaatggtcatgcagggaggatgtttgccattacaaactgtttaagcagggaggaggtgatgattttagggggccctgagaagcagacaagccatctgaatggagctgtttgggtgactcggaagttactatgatcagttggggcttgaagttgtagggtataattacactgatgggatagcaggtgtcccaggggcaggcctgataacaggttccattggatgcataaaggggcttggaaagttaagatggtattcgcggttacagggccatgtatgggtttttcattgctcatgtaatagatgaagttggaaatgtaagagcgtaaaagctggattgtacgtcctgttagggtatttttggtcctatcggagatggggaagttggctaatgattgcatatttacaagttggaaagggtattttccttcataacgggtgtccaaagtttaactcgggtgtggtgaatccaagattccacttctgccaccttaactgtagtgggggtagagaggattacggagtatgttccttcccacaaggaatccatagatggggaggtagaggggagggacttgaccaacactagatctcctggttggaacaactctgttcccttgtcttcgtgacatccttcgggtaggtttttaagattttattgatattttgccaaagaagttatatctttgaccaaactggccatttcctgataaagtagaaggtcattagtgagaaaaggtcatccatacagcatttcatatggactgagccccattttgtgaggagaatttcggattctcaacaaggccatgggcaacagagtaggccatgggaaatgagtttcttgtgttagtttccttaggtgcctcttgagtgtttcatttgccctctagaccttccctgaggattgtggcctccaggtgcagtgaaggtgatattttatccctagtgccctggaaattccctgagttaccgtggctttaaaagccagactgttgtcgctttgtaagctttggggaagcccaaatctaggaattatttaatgaattaggtctttaaccacttcctgaaccttctctgtcttgcaggggaaggcttctatccaatttgtaaaagcatcaacacagaccaacaagtattgaaatccacttgacttaggcatatgggtgaagtctaattgccagtcctctccaggatagtgccctattctttgttccccaagaggggccttacaatgaaccaagggattattcctttggcacacctcacaggctctgactacttgttggatggttcagaggagatttgaccctgtaaatagggatttagctatttgatgagtgctctcaatacccatatgaaaagtttggtggagggtcttaagtattttccactggctggcttcgggtatgagtacctttccctcttctgtcattaaccacaccaaggggagaaaactatgcccccgtgaaagtcctcattctgtttctgtcggagaatactggggcttaatctcctggagagggttgttccataacaagggtccttattatgggtaataataacaatatggaaccttgttccataacaagggtatttctaatgggaggttctgcctggcagcaattttagcctcagcgtctgcctgacagtttccttctgccttttctccttcacctttttgatggcttcggcagtgtaagactgccacctccttgggtttttgcacggcgtgcgataactccatgattttcttgtggtatttaatgggggtacccccagaagttaggaactccctttcattccatattgcagcatggccatgtaagattagataagcatacttgctatctgtgtacatgtttattcttttttcctttcccagttctaaggctcaggtaagcgccactagttctgctaactgggcgctggtccctgggggaagaggcttactttcaagtactgttacatcactaactatggcataacctgcctttcatatcccattctccacaaatgaacttccatcggtatataggttaaggtcaggattagctaaggggacttctaagagatcctcttgggcagcataaggctgggctacaatttgttggcagtcatgcttgattggttccccatcctctgggagaaaagtaacagggttgagggcagcacatgtgtgtatttgaagcaccagcccctcaaggagtagtgcctggtatctaagcagatggttgtctgatagctataaatttcctttggcacccagtatgccatttacatcatgagtagtccagagggtgagatcctttccttgtattattttgatagcctctgatactaagatgaccaccgccataactacccataaacagtgaggccagccttttgctactacttaggtatttccttacttaggtatgccactggttgtggggttgttccacgagtctgagtaaggactccaagagctattcccaatgtataaagagaagttttgtgacgtataaagagaagttttgtcctgtgagaaggcttaagactggagcttgtactagggcctgctttaaggttttgaaggctgtttctgcctctggttcccattctactagataagtatttgccctctgggtgtccttgattagagtatagagtggcctggccaactcgctatatctggggatccatagttggcaaatgccgatgatcccaaggaacacccacaactgctttaatgtctttgggtgaggaaaagccaatataggctgtatttgttctttgctgagggccctggttcctctggctaagattaggcctagatatctgacatgctgtaggcagagctgggccttcaatttagatgccttgtacccttgattagctagaaagttcaagagatgtagagtagcctgctggcatgaggcttccgaactggtagccaaaagtaaatcatccacatactgagggaccagagtgcctggacttgagaagtggcctagatcttgggccaatgcctgaccaaagagatgaggactatccctaaactcttgaggcaagaccatccacatgggttgggaagtgtggtctgtgggatcctcaaaggcaaagagaaactgggagtcagagtgcaggagaatgcagaaggtggcatccttgaggtccagaacagtgaacaattctgcttcctctggtatttaagacagcatggtaaatgggttgggtacagctggatatagaggaattactgcctcattgatgagtctaagaccttgcactagtctccactgaccatttggtttttgtactcccagaattggggtgttgcagggactgctgcattttcttactaagccttgaacttttaaatgtctaacaatatcctgtaatcctttatgagcttcaggtcttaagggatattgcctttgataaggaaaggtagtggggtcttttagcctgatttgaactgggtgggcattttttgcccttccaaattgtccttccaatgcccagacttcagggttgttccctcttcaagtaggggacaacaaatgggtaacttgttccccatattcatgtaaataatagctccagctttggctaatatatctctccctaataagggtgtagaactttcaggcataacaagaaaggcatgtgaaaagagcagtctcccaattacaaatgaggaggtgggagaaatacctggttacaggctgtcccaagattcctcggatggtaacagaccttgaggacagccatccagggcaggagcttaacactgagaaagctgtgccagtgtccaggaagaagtcaatttcctggccctcaatggttaaacttacccgaggctcagtgagggtgatgacatgagctggcacttgccccgggcaccctcagtcctgttgttggatcatctggttgggggcttctggcctagagaagctttgtcctctggggcagtgtgcctgccagtgattgccttggcatagtggacatgggtgagggggcggcttgtttctcattggacaatcttttttaaagtgtccctgcagaaaaaaaaaccaaacaccgcgtgttctcactcataggtgggaattgaacaatgagaacacatggacacaggaaggggaacatcacacacgggggcctgttgtgtggtggggggagggggagggatagcattaggagatacacctaatgttaaatgatgagttaatgggtgcagcacaccaacattgcacatgtatacatatgtaacaaaccttcacgttgtgcacatgtaccctaaaacttaaagtataataaaaaaaaaagtgtccttgcaaaccacactgataacaagccctactgggtgattggcctgctccattttctgtcctctctgaaccaccaaggtttgtttgtctgagggccatgactaagtctgcggcctttctcttatctcgcttttcctttttggcctgttcctcttggtccctattatagaacaccaaggttgccaggtttaataatgcctccaaattttgttcagggccagggctagcttttggagctttctcctgatatctgcggctgatttggtaataaacttatctttgaggatcaattgaccctcgagagagtcaggtgacaggagagtatattttcttaaggtctcccatagtcactcaaggaaggtggtaggattttcttcctttccctgagttatggtggacttcattgaatgattcatgggcttttttctaattctccatagtccttctagaacacaggtcaacagatgtttgcaactccagtccccatgatctgagtcgaggtcccagtggggatccatactggggatggcttgctgacccatagggaatttgtccctttcttcagctgtcattctatcatttacttgactaagataccaggtatctccaaactctcaggctgcagctaaagccgcattcttttcattaaaggccagtgtttgatctaacaatagcatgacatctctccaagtgaggttgaaggtttgccctagaccctgtaggacatctatatacctataaggatcatctgaaaacttccccaggtctaccttgatctgctttaaatcagagagggagaaggggacatgtacccgggttgggccaaattcccctctccctacagcttgaaggggacaaaaccgatagccggcggggggggggtgggggctgtggtaccttggagatttctttgcttgtttctttctgggtgggggagattagaggaggcttatcagtttccattggctagaacaggaccttccattctgtatttgtcctgattggctagcaacttaggactttttaaaagaggcaaaggcagaggagaacaaaggatggaggaagtaacttgtgggatgctgagaaaggtaaaaacaccttcagataaggaagaggaacagactatgacctaatgcttgcttggaccagtataagcatgccagggcaaatatttaggctaaattgtgggagctaagaacataaagtacactgatttctttattacagctagcagatatttaagaatgttagtgagaggtgacagtgtgctggcagtcctcacagccctcgctcgctctcggcgcctcctctgcctgggctcccactttggcggcacttaaggagccctttagcccaccgctgcactgtgggagcccctttctgggctggccaaggctggatccggctcccccagcttcacggaggtgtggagggagaggcactagcgggaaccaggctgcgcacggtgcttgcgggccagctggagttccgggtgggcgtgggcttggcaggcctgcactcggagcagccagccgtccctgccccgggcaatgagggtcttagcacccgggccaatggctgcggagggtgtgctgggtgccccagcagggccagcccactggcgctgagctcgatttcttgcgaggccttagctgccttcccgtggggcagggctcgggacccgcagcctgccatgcctgagccttccccgccaccacgccctcctcccccccgccctcctctcccccccgccctcctcccccctgccaccctcctcccccactcctcctcccctcctccccccgccctcctcccccccaccctcctccccacccccctccccacccccaccctcctctccccctgccctaccccccgctccttccccctcctaccccctcctcccccgcctcctcctccgtgggctcctgtgcagccggagcctccccgacaagtgccgccccctgctccacggcacccaatcccgtcgaccacccaagggctgaggagtgcgggcgcatggcgcgggactggcaggcagctccacctgcagccccagtgcaagatccactgggtgaagccagctgggctcctgagtctagtgggaacttggagaacctttatgtctagctaaagtattgtaaatacaccaattggcactctgtatctagctcaaggtttgtaaacacaccaatcagcaccctgtgtctagctcagggtttgtgaatgcaccaatcaacactctgtatctagctactctggtggggacttggagaacctttgtgtcgacactctgtagctagctaatctagtggggatgtggagaacctttgtgtctagctcagggattgtaaaggcaccaatcagcgccctgtcaaaacagaccacttgactctaccagtcagcaggatgtgggtggggccacataagagaataaaagcaggctgccccagccagcagtggtaacccgctttgatccccttccacgccgtggaagctttgttgtttcactctttgcaataactcttgctactgctcactctttgggtccacactgcttttatgagctgtaacactcaccgcgaaggtctgcagcttcactcctgaagccagcgagaccacgagcccaccgggagaaatgaacaactccagacgcgccgctttaagagctctaacactcaccgcgaaggtctgcagcttcactcctgagccagcaagaccacgaacccaccagaaggaagaaactccgagcacatccgaacatcagaaggaacaaactccagacgtgccaccttaagatctgtaacactcaccacgagggtccccggcttcattcttggagtcggtgagaccaagaacccaccaattccggacacattagtacaggtctttgaataaattttgcttctaacagaagttactatttattcctaattagatgggcaggaaagtctttgaagaggaacctctactttactttttactgtagagagagtagtctttgatcttggggagatggggtttttccttttggtttagcttcaggaagtttgtgttaattggccttaggtgccctgcccccagccccaggtgtttttcctttgatttaactttaggaaattatcacgaattggccttagattccccgaccccagatcttggtgttttcacttttaggaagtccgcatgaatcttatctatgctcttaactacgtcctaatttttgtgttttttgtcttttttataggaatagggttttgccatattgcccaggctggtctcgaactcctgagctcaagtggtctgcctgcctcagcctcccaaagtgctgggatcactggcgtgagccatcaggcccagcctctatgtgctaatttttgaacaaattccaataggagcattctagtctctgagtgtgagatgaccaaaaatcaagcccttgtgaggctgaatagagtcgggaggcagggaacttaaggctgtttcaggccgacttcctagaactaaattgaaaggaaaaccctcactttcctcgcctaaataacaaaaggaccagaggctactccctttgaccttttctgctggcagataggaaattggctgtctgcaacaaatcagactgatggccggttgagtcttcatttgcatagaagtgtaactttgtaacgtcgtaacttcaccctagcctttgattggttgctttttgcaaccaatcagatgtttgcacaggagtgtgacctttgtaacttcagactctggttggctgctttctgcaaccaatcagactgaacgcgggctaccgcttcatttacaggaggtgagcatgaagtggccaatgggaaaattctaggaggtattgggactcatgaaggttctgtttcggagcccttgagctgccgcttggccagttcccacactgtggagtatgctttcgttttcaacaaatcccagctcttgttcttttgttgcttcattctttctttgctttgctgggcgttttgtctaattctttgttcaaaacgccagtaacctggacagcttgcagtcaagaccccctaccggtgacacttgcgctcttcggggaggtaaacagcatttcctctcagctctgggttggaaaaagccgcagcagctgatgggcccgggaacccgaggccccgccccctaggtggtcctagcctttgcgcgtgcgcggcgtgtctgcgtgggcgcatgcgcataacggccgccatcttaacagcgcgttcccgttggcgtctgaggtaagtttttgtttctgggcggcgttcggtggtgtcccggtgcagccacgcgagagtagaagggtggaaaggggaggtgcccagtgaaatggagcctgtcccgtgcactttcgggcatttcgagcatcttgtgggctctcccaagtcgcggcccctcctctgagagccacagtcaggtctgtcctcaggggtcgaggcggctgcgctggggcctcggcccgggaggaggcggggggcacggcctttccattttccctgctcccctctgcagaagcctcatagggcccggcgcggcggctcacgcctgtcattcccagcgctttgggcggattgggtaggaggattacttgaggccaggagttcaagaccaggcagggcaacatagggagacccccccccccaaccatctctaatggaaaaaaaaaaaaaagtctccacatccagcgttgtgccttttctctataaggaacagcatctctgccttcctgttcacggtgaccttcgcttggtgtcctcctggcctcagcaacctgacaattctgtcgtgtcccggtgagcacttcatgcacttgttctggctgtgggtgtcgggtcttgaagtttaagttgtgtcgaggtggaaagaaaccttttcaggtggttgttcgagagcacatggatctgataccatcgaatgcatgagtggatgaatgcacataactgtaaaatttaccaccaaggaaaaacacaggactactcaactgtggttccaggccatcacctagatctcactctagcgccctgtagattcccccagaggttcaaaacgagggcatccccaggaacacggtgcgggctgatttactagcaggagggattgaattgataatgaatgcgaagataacttttgacaggtgggttttctaccagttactcatttgaaagtcttactgagggcggggcaaggtggctcacacctgtaatcccagcgttttgggaggctgaggctggaggatcgcttgagcccaggaatttgatgccaacctggaaaaaatagggcaagcctctgtctctactaaaaataaaaaattagctgggcatggtggtgtctgtggtcccatccactttggaggccgagatgcgaggatcacttgagcatgggaggtcgaggctgctgtgagccattattgtgtcactgcattccagcttaggcaacagagtgagaccctgtttcaaaaagaagaaaaaaaaacaaatactgatctagagaacatctgtagctcgagtaaaacaaatgtctttagtccaggtgtggtggctcacgcctgtaatcccagcatgttgggaggctgaggctggcggatcacgaggtcaggagtttgagaccagcctggccaacatagtgaaaccccgtctttactcaaaatacaaaaaattagccgggcgtgggcacctgtaatcccagctactcaggagcctgaggcaggagaatcgcttgaacctgggaggcagaggttgcagtgagccaagattgcacccttgcattccagcctgggcaacagtgcgagactccgtctccaaaaaaaaaaaaaaaagtctttaacccttaactacattcactagttgttaagatttgtttcatttttttgtatatgtactttatcatgagccatttaaattggaagtgaatgaactttccccttttaagcgtgtatctcaaatacctcctgaaagtgaagacaagcttaaaacaagacttcattgtccatccccacccccaaatcaaatcagatttccccagctgtccaaaagtcaccatagtcaccattatagttgccaggttgtttgcatgtttttagatctgttaaatctgttttttaactagactattcacctgattttttttttttttttttttttttttgagacggagtctgtctgtcccaggctggagtgcagtggtgtgatctcagctcactgcaacctctgcctcctgcgttcaagcgattctcctgactcagcctcccaagtagctggaattacaggcgtgtgccaccacgcccggctaattgtatttttagtagagacagggtttcaccgtgttggccaggctggtctcgaactcctgacctcgtgatctgccggccttggcctcccaaagtactgcgtgaaccaccatgccccgccattcacctgaatttttaaaaataaaattttggcctttgaagatttcaggagcattatcttgtaaaatgctgccgttctcatgcaatgatgttttcctgtgattttatttgatttacctatgtcctgtatttcttgtaaagtggatgttggggttacagtggtactgtctaatacaaatataatgcaaggcacagatgtaatttttaaaaattttagtagccaaattagaaaatgttaaatgtatgtgtgatatcatttttaatatattaaaaatgcagcatatccagttatcaatataagtttttgaaattagtgactaatgtagtcagtttaaaactgagacatttcacacttcttttgtactaagtctttggaatcctgcacgtattttacacttacagctaattttcattggaaattcttgatctgtatttagagtttataaaattaactattgaaaaagtagattaacaaacccaggttgttccaaacatacttaaaagtttttcaataacaattttatttttaaagttgaattaaaagtaaataaaattaagaattcatttcctcagttgcactagccacatggggctagtggctgttgagttagactggccagatccaaggcttccattttctaggtaatgtactgggcttcatattatatcctatcagtagtcacatactacaagtttgttagtgatactacgcatttggtcaaggtactcatctctgtatagtcatgtttttcttatagtaatctataagtgatactttggctacaggggaatattctgttccccaacagcctttcacccagtggtttttttggttttgttttgttttgtttttttttgtttttgtttttgttttgacggagtctcactctgccgcccaggctggagtacagtggcgtgatcttggctcactgcaacctccgcctccccggttcaagtgattctcctgtctcagccttctgggtagctgggattagagatgtgggtcaccacgcctggctaatttttgtaattttagtagagaaggggtttcacccatgttggtcaggctggtctcgaactcttgacctcaggtgatcctcccgcctcggcctcccaaagtgctggaattacaggcatgagctaccgcgcctggcctcacccagtggcttttaacatcactcagtcatcttctcctgaacctgtttttacattgagaggttaacagttttttttcctagttctgttgttctttctccattctttagctgacagtcttaggtgaagaggagctttctttcaccactttcactgccctctatactttttttcttttttggaatgtcacaacttattctaatttttttttcttttcattcactgtattataatcaattcctgtcattcgtattgatgctcaaactgtcccaattttgaccaatggtaatttttaaatttggctctgtgtcttgtgacacaactctactaatctgagtgcaaaatcagaccccagttcactttgtattttcctcttacagacctggaatcaatgattgctccaaaaagtcatgttccttttagacactaaggtctgtgtgataggcccacagtggacatctatggccttacagtggacatctagaatatgtattttcttacatcatacatttatactcatattcctattacaaacttaagaggttttttgtttttccttatgtttgtatctcttatctcttataataaagaccttgactcctaatgacactgatatattatttgttgtagcaacattaccagatgactagtattactaccattactttatttagtattgagtttctttatatttctttttgtccttactaaggatataaagttcaaacatttgcttgaactcagtttttttctctgtgtggttatgttatgaatttgacatactattaggcttgtttgtcttttttttttttttttttttttttgagacggagtttttgctcttgtccaggctgtagtgcagtggcgcaatctcggctcactgcaacctccacctcccgggttcaagtgattctcctgcttcagcctcctgagtagctgggattacaggctcctgccaccacacctcactaatttctgtattttagtagagacgagctttcatcatgttggctaggctggtctcaactcctgacctcaggtggtctcaactcctgacctcaggtgatccacctgcctcagcctcctaaagtgctgggattacaggcatgagccactgcgcctggcctaaatgcatcagcattttgatagtctcagcgcaaagtagggctgtataaaggggtcatcatccgtatctgggtgcaaacaacacggtgtcgcatttccttggaaaacagtaaatttgagtagatgtggaatgttgtgtcagaagtcttttctttgaaactcagcacctgggttgtaaatggatacttcttcttggtgtcaaaatattacataagccctccaggtgaaagtgggatatttcagtctttctgatatttcttactgatagaatttcaaacagcaaatttctaataactgattttagagaacaaagtttcacagtgtgtaaaaaagcaacaactcaaaaaagtcattagaactgctttgttctttttgtggtgactgtgcagctgtgtttttttgttttttgggctgggggtttgaagttttaaacttttctttattattcttgtgcttacccaatacagctgtttaaaaatcatagtttattattcctgtttcataaatggaatgaccttgagcatatgtggtgccatagtttttaatttcttttatatttatatacaatatgattgatttttgtagttagtctttgtttttcaaggtcactattttcttattactattttgtctgggtgatccagtcattgttgaaagtggagtgttgaagtcccctactgttatcatattgctttttcttctttcagatccattaatatttgctttatgtatgatgagctccctaaatatattggtgtatatgtacttaaaacttctatatccttttgataaattggtccatttattatataatgatctttgtctcttgtcacaatttttgtcttaaagtctattttgtgtgatgtaagaataggggctcctgctgtcctttggttatcatttgcatggaatatctttttctaacccttgacatttagtctgtgccccttaaaattaaaacgagtctcttgtagccaggagatagttggatcttgtttagtttgttttgagacagagtctcactctgttgcccaggctagaatgcagtggcgtgatcttggcctactgcaacctccacctcccgggttcaagcaattcttctgtctcagcctcctgagtagctggaactacaggcatgtgccaccatgcctggctaatttttgtatttttagtagaaacggggtttcaccatattggcaaggctggtctcgaactcctaaccttggcatctccctgtttcggcctcccaaagtgctgggattacaggtgtgagccaccgtgccccacctgtttgttttaaccatattcagccattctgtgtcttttcattggggaatttaatccatttaaagtaattgttgatagatgatgacttgttattaccatttacttcattgttttctggctgttttgtagtttttattcctgtcttctcttgcagtcttcctttgtgattgatgactttttgaatattccattctcctggtttgcaaggtttctgctgagaaatcaaagggtagtattatggagattcctttgtatgtagtaagtcatttttctcttgctgctttcaaaattctctgtctttgacttttgacaagttcactataatgtgtattagtttagatctctttcagttgaaccttgttgggggctttgagattcatgaatatgggtgcctctgtctccctagatgtggaaaatttatagctattctttatataggctttctactcatttctctctctgctccctctgtaacttctttaatgtttctgttcacttggcagagttccacaggttctttaggctttcttcactctttttcattgttttttctttttgttcctctgactgactataatctattttttattttgttgattcttctgtttgatgatgtctgctcttggacccctctagttaatattttagttcaattattgtactcttcaactccagtatttctcttttgttctttatcatttcaatctctgggttgaatttctcacttcattcatgtattattttcctgacctatagttatgtatctctgctgtcatttaactcactgatctttaagatgattgttatgacttccttctcaggttattcacaggtctccatttcttttgggttggctactgaatatttgttttctttgtgtcatagtttcttcttgattcttcatgctatttgtaggtttgctttgctgtctgtgcactgaagtagtaggtatttctctcagtctttatggcttagtcttgactgggaaagacgttcatccattagcagtgctccatatgagacaagatcaggactgacccctacagaagtataccataaggttgatgacaagcacaccttctcttctctctctctccacagaaaagcctctgtttgtgatttttctcagtcatacagagcagatgtaagaggatgtctgcctcatttctttctcagatgatcagcaccttagtatgaggcaagatggctactggccccttggagaaccctctgagaggtcaggaggtcaagtagccaatctcacttcttcccatgaagaaataatgtgccaccatgtccagctaattctttagttttctgtagagatggggtcttgctatgttgctcaggtgggatgcaagtgattctcttgccttggcctccccaagtgctgggattacaggtgtgagccactacgcctagcttcctttggaattatttttaacttcattttaattttaaggggcacagactaaattgtcaagggttagaaaaagatactccatgcaaatgataaccaaaggacagcaggagcccctattcttacatcacacaaaatagactttaagacaaaaattgtgacaagagacaaagggcattatataataataaagagaccaatttatcaaaaagatataaagtcagcacaactgagctgagctggttttgcagaagggctgatgagggtaagttgaaaattgttcttactggtataaatgcaactgttctcagtttgtgctcctctagggttgcttgcaattattagcttgattatggatttctcttcaaggtattttggttccagtattgttactatgtgtttccatgagtgaacagagaggtagggcttcctactctgccattttactgacattttttatgatatattacttattgaatcttaaaatacaaataaagtagttctgaattgctaattcagacccctgtggaaaacagatttattaactgagttatttttgtgtcattcttttatatttaggcttagattatatgttcaaaatactgttttccaaaatcacttagatgagttatttttatctttcaatatggttttgttattcatttgtaatacagttaaaaagcagtcgtttttgttaccttaaagtataatgttagctttggcgtttttgtagatgccctttattaggctgaaaatttttcttgggcttattgaacttcattaaaaacaatcatggttaatgaattttgtcaaattccttttctgcatctcatgagatcatctgattttctggcctgctaatatgttgcattaaattaatttacatttgaatatcaatctggcatttctgggatatgttctaacttgatgtattatcttttcatatatagaggtatacatatgtatgtgtgtgtgtatatatatatatatcactgtattcattttgctaaaattttattgagggtttgtgttaactctctgctctgcaaccagcctgtgatagctgagggcccagagtaccttaaatggatttatcttcacccctttgccctgccacttgccttggggggatggttgcctcggtcatcagggaggctacatgcacctcagtgatcctgccttatcccagcctttgatatactatggtctaatattaggtgaaggcttggtgaaagtctgtggatggattcatcactgtgaattctgtaactgagatgtctcagaattctaatgtggtcaatcagtccacactctgctgtcaaattttggtaagatttaattatgatttctttataccttcatgtgtggcagattctttctctcatcactcatccaagattgagaaaaatcatgggtatcttctttcttagcaaagcttattatttaggtgtatctgcattcttggctctctgaggtatttttaaaaggtatgattttgtagttatgtggcttgtgttttaagagagaaggatcaacccttggaagttctacattctaatatgaatgtatgagaaaatgtatcttggtttttgttttgttggatttttgagacaaggtcttactctgttgcccaggcaggagtacagtggtgagatcacggttcactgcagcattgacctccctaggctcaggtgttgctcccacctcagtcttctgaatagcttggagtataggtgagtgctaccatacctggtgaagatttgtattttttggtagagacagggtttcaccgtgtgttgcctaggctgggctcaagcaatctacctacctcagcatgccaaagtgctaggattacaggcatgagccgccatgcccagccagaaaattttaaaaatagatatttgtagagttatgcatccaggaggatttttagaaatgggacttctaagtcaaagggtaaatacatatataatttaactatatcctgccaaattccctagtgttttttcttttaatgaagttaaaaataattccaaaggaagctaggcgtagtggctcacacctgtaatcccagcacttggggaggccaaggcaggagaatcacttgcgtcccacctgagcaacatagcaagaccccatctctacagaaaactaaagaattagctggacatggtggcacatgcttcttctcctagctacttgggatgctgaggcaggaggattgcttgagcccaggaggtcagggctgcagtgagccaagattgtgcctactgcacctcatcctgggcaacagaacagggccctgtcccccacccccacccagaaacaagcctgagaataagaggagataattcctacgtatgtaactgacaaaaaaaaaaaggctaatatccaaaatacattaagaactcttacacgttaattccaaaaattcaaacaatccaatagaaaaattaagaggcttgagcaggctcttcgcaaaactgactgtactatggataataaacatgaaaaattgaagtttttatcctcatcaataatcaggcaaatggaaattaaatctgccactacacatatatcagaatggctaaatccaaaaagagttacgagatgttgaagagaatttagagaaactagagtttgtgtatacttttagtgtgtaaagtagaaatatgttttgaaaaacagtttggcattgtgttccaaatttgaatgtaaggatatacccttaaatgcgaccatataacatcattatttgaaatagcccagaattaagcaactcaaatgtctgtctacaagaatacatgaataaaccatgctatactggttaagtgtcagaaatacttgggaccagaagtcatttggatttcagatttcttcagattttggaatatttgcattatacttcagaaatttaaaatgtttcagtgagcatttcctttgagtgtcatatctgtgctcaaaaaggttttttggagcattttggatttcagattttcagattagagatattcaacctgtattatggagtgcttttcggtaaaaggaaaagaactatatgtgtaacagtatggatgactcataaacataatgttgaatcaaaaaagctagacataaatgaatagatgatttcatttataaagtttaaaaacagacaaaattaacctataccgttagaagtgagaatagtttccatttgcgaagaggggcaatgatttagatgtgtcatgtgtgcatcaaggtgtagaaattaatgatgcattatacctttgtaattctactcttttgtgaatatatatttcaattaaatgtttaaaaaattcagatgtcatttccaggtgtttgaaagagattagcaaaatgagtataaagaaaacataacactaaaagcaacatttaatgggaaaaaaagtaaaactgatgagtaaacccaagagataggttttttagaagtataaaattggctggtcatggccaggcggggtggctcatgcctgtaatcctagcactttgggaggctgaggccggcggatcacgaggtcaggaggtcgaaaccatcctggctagcatggtgaaaccccttctctactaaaaatacaaaacaaattagccaggcatggtggtgggcgcctgtagtcccagctactcgggaggctgaggcaagagaatggcgtgaacgcgggaggcggagcttgcagtgagccgagatcatgccactgcactccagcctgggtgacagagcgagactctgtctcaaaaaaaaaaaaaaaaaattagctggtcatggtggctcacaccggtaatccagcacgttgggaggtcaaggcgggaggatcgcttgagcccaggagttcaagatcagcctttccaacattgcgaggaaccccttctccattccagccccaccaccaatctctgccaaaaaaatttttaattggccgggtgtggtggtggcttttgcctgaagtcctagctactcagaaagctggggtaggaagattgcttgagcccaggagttcaaggctgctgtgagcttgatcctactattgcactccagccttgggaagagtgcagccctgtctcccccatacccccagaaaaatataaaatagacaaacttttgcacaatgtgtgattcagcatttcatccaccccatacattttcttttttcttctttttttgttgagacaaggtctggctctatcgcccagactggcatgcagtggcgtgatctcagctcactgcaacctttgcctcccaggctcaagccaccttcccacgtagctggcactacagacacgtaccaccacacctggctaatttttgtggtttttgtagagacggggttttaccatgttgcccaggctggtctcaaacttgtgagctcaagtgatctgcctgctttggcctcccagagtgctgggattacaggcatgagtcacaccccaaatattttctaccctctgctaggacctatgaatattaaaagaaaaacttcagataaacgtaatagttaagcattaaaggattcgtgaatcaggcagcactccaaaaccagaagggttcagggggctctgctgtagcagcatgcacagttggcttttgtagactgaatgtgaaagcaaagtaaagaaattacttaattggcttagccttagcagtattctgagtttctttagtgaaccattattattactctattgctttggataaaaagttgagtgtcaacttttttagggaagccagatgtcagttttcaagtgtcttatggttattttcttatattttcttgccagaaccagttctgagtctgtaaatatacatttatatgtgtgtgtgtggtaggggaggtggaggatgatattacttatccattcatctatttttttccatagtacttgtcaccaattgacataatacatatttatggctggacacagtggctcatgcttataatcctagcactttgggaggctgaggcaggcggatcacctgaggttgggagttcgagaccagcctgaccaacatagggaaaccctgtctctaccaaaaatacaaaattagctggggttggtggtgcatgcctgtaatcccagctactcgggaggctgaggcaggagaatggagtgaacctgggaggcagaccttgcttgcagtgagccaagatcgcgccactgcactccagcctgggcgacagagcgagactccatctcaaaaaaaaaacaaaaaaaaacttatgtgtttattatctgcttagccctttagaatgtgagatacttaaggtctaggacattttttgtatagttgactgctctatcctaagtgtctagtacattacctcacaaagataaggtccttcataaatgtttgcagagtgaatgaaagcgtaagccagagatgaggacttgaagggaagccacctggcctacatgatttttacagctggaggagctaaagatgtctaaattcaataagccatttgtgttgggggtcctcaagaccaccaccctcacgctcagtgatggaagcactcacaggactcagaagctattaaacctacagttatggtttattataataaaagggtacagattagaatctgcaaagggaaaagatgaatgaagtctagaagaaaccaggcttctctcccatgtagtcacatggacagtgcttaattctcctagtaaaagtgtgtagtattcctgcaaactgttgccaactagggaagctcacctgagctttggtgtccaggatttttactgagggttagtcccgtaggcatacagcacctgaatgacttcatacacttatgcccagcccctcaacagttcaaactcatgcattattgccagaagcctcaggcatacaaaaacaggccttcagcataaatcatattgttagcatacacaatctggtcacactagtatagtttggctcaatagctcaaccatagaaaaatatacacttaccagggaagatattccataagctaaaaggtcatctctcacaaactgagccaagtgtcagtcctgaagacagatctttctcaagagagtgcagggtttgggcaacccaggcctgttgagttaacctttccgtacatcatttcatgacgatctcatggtcacgttggagaataagaagaacctcaggagtttaggtttgtgagtcagagtaacctgtattcatatcctggctcacactttctaattggtgatgttgggttaattagtgtctgagcttaggtttcctcaactaatatgatagtaacaaaaactgctttgataattatatgaacttatcctaccactgtttctggcacatgggtactaggtaaacgggatttgttattatttatgtccacgtggcataatactctagtggcactcacatgaacaacttcatcttctgcagagagatggctaatgaatggcgcttgatgacagatgagtaatgcctgttgctgaaagattgacggtatgaggcaagactcccactactacttaatcaagaggaattgagattgacttacccataagttcagacagtgtctcgaagagactttgggaacaagatattcaggcacatttcactgttagactcacaggatgctggccattggtctttccctttgtggtaagtccgtattgatggtccttcaagacgctgctttaaccagtctgtgaacagcttgtcttgtgattagggtttagggtctaagtggccctgcttttgagatacctagaagaggctaaagtagatacgaatattctgtggtctaaatcctgggatttgggaaggaggagtaagtatgcaggcttttgtggaagaagttctgcttaatcacatgatcagtttcttttttggcaaataaggaaaatgttaacttctctggactttgtattccttataaaatgggattgttaaactctctctctcctggtcatcaaagcctgaagcatattttctggcttcaggtgagacaggctgctcaggcattttattataacgtgtgtgtgtccacttagcattagtatgaggtggcttcttgccttgtgagtatggaagctatcagcagcctggattctcagattttatttcttcttcttaagatcatctttctcaagatgttttctgtcttcatgagtcaaaatttgaagaggaaaggatggtggctgggtggttgacaaattactctcaggtaagtaggaaattgctttttctgtagaagcatatgcttcttcctaccatgtagatgtgttttctcctagtggaacagggcccctgcaagcaaagagggtctgcttagggaccacatctctcatcaaacttcttcggaccacagggcctctcacatggttgacaggtttcacagggaaatgattgtactatcccactgtttactaattcagtctgactgtcatccatgctgatatgctttcattttgctgtgatagggagagaatgcacatgtgcttctcggaatttgtgctgtcactggagcatttatttgagtgtctataatgtattcagggttgtgctaaaacctgtcagtagagaacaataagaagaagtcacaatctagttgtgctgagatatattcagttaggtgaaagaggtgctcttcaagccatatgactagatgagatcaccggtgaatatgtacagacaggggagaagaaagtgaggaccatcaagtgataggagaccaaagagtcttgtcaaggcatgccaagacaaggtccctcattctccagtcaacatagtggagaacgtacttgcctgacgccagcatgtgtgtgatggtttaggactcagtgacctttgaggatgtggctgtggacttcacccaggaggagtggactttgctggatcaaactcagagaaacttatacagagatgtgatgctggagaactataagaatctagttgcagtaggtaaggctggtaccattcttttcatttagtttttttctggaacaaatgtgtcttaagtaactatgttctagactctgcttgttaatgggctgcattggtaaacaggcgaaacattgtttccatctcatagaccttactgccttgtgatttttctgatgaaattgaagatctgttcattgttctagctttattttctccatggataaaagacttagagcttcttgaatatgtgtatgagcttaagcctgggtttcatgggaaggattgctagtccttttggtgaacagtgaatgagaaaagagtatttgaagtttaggttcacttgaaagtttttgtcatgaacattgtgttgtaatttaagttatatctgagagggttcagaatgcccagacagcaaaatcttagctcttaacatggaagcatttgttatcccttgcacattctttactttttttttttttttttttgagacagagtcttgctctgtcacccaggctggagtgcagtggcgtgatcttggctcactgcaagctccgcctcccgggttcacaccagtctcctgcctcagcctcccgagtagctgggactacaggcgcccaccaccacgcctggctatttttttttttttttttttttttttgtatttttagtaggaacagggtttcactgtgttagccaggatggtctcgatctcttgaccttgtgatccgcccacctcggcctcccaaagtgctcggattacggcatgagccactgtgcccagccatcccttgcacattctaacatcattcatctttccctgagaccagggtactagctatgcaaacatagtttgacttttcaggtgaaacaagaagagttaaagacagcgcagaaaattctccaagatgagagaaaagacagatgtgattatttgtgagaaacagccctgatctatgagaggtgcagtctgtttataaatattaagtaggaaggttttgaaagtgtacttttttggggagaatatcaaggccaattggtttccaaggttccttgggtaccttaacttctctttcactttatccatcttggaaactttcttttgctctgacattaagatctgtctcacttctcctttaaatttatgatttgcatttagctctgtatccatttcctttcaactttgtttccctggctgtacctcttttttgttcactataaagtctcaatgtttagagaaccatttcttttttttctctctctgtctctaaaaaaaaaaaaaaaaaaaaaaaagagtcttgctctatcgccaggctgaaatgcagtggcgcgatctcagctcactgcaacctctgccttccgggttcaagtgattcccctgcctcagcctcctgagtagctgggactacaggtgcatgccaccttgcctggctaattttttttttttttttgtattttagtaaagatggggtttcaccatattggccaggactcaatctcctgaccttgtgatccacctgtcttggcctcccaaagtgctgggattacaggtgtgagccaccacacccagcctagagaaccgtttcttagtgaatcacctaccaacttgacctcagtaccttactgttgctagactcttactacatccaaatttctcaatttatgtttcccgttctttaaaaaaacaaactatatttcaagccagtgtttgaaactacagtacatactagtcttgcatttttaacaccctttttaaaatcattatttctctaagaacttaaaatttttttcatcttatttcagattgggagagtcatattaataccaaatggtcagcacctcagcagaattttttgcaggggaaaacatccagtgtggtggaaatggtaagattcagaaggtataatttattgtcttccatgttagaggaagattggaaattccttaaaatggaaaagcagcacaataaccttgagacatttgagactagtgtttttcacccaaaaataatctgtctcttggagagactatggatcatgagtttgacaaacactctaaacatccctcagaatatatttgtttacatatttccttcaacattcccatatgtatctcagatgtttttgataaataattcactcttgggccgttatcagctaagctctatttagaagccctctgaaagtaaagaatataacagaacttcctgcagtcactttgttccacttgaaaacactcaggtctgaaccatgccttgcaatgaaaatggcaggaacaaacagtttcaattatactaacttattttccatgtgtaacagaattcagagtaaaagggagaatctcaatgaaataaatttggaaaacttctatgaaccatcattaattttcaccaacaggagagaaaccattttggagaggaactgtttgactttaaccaatgtgaaaaagccttgagtgaacactcatgccttaagactcacaggagaacttactttagaaagaaaacctgtgagtgtaatcaatgtgaaaaagccttcagaaaaccctctatctttactttacacaagaaaactgatatcggagaggaacttcctaactgtaatcaatgtgaaacagccttcagccaacatctacatcttgtttgcaagaaaactagccaaaatctacatcttgtttgcaagaaaactcacactcaagagaaaccatataaatgcagtgactgtgaaaaaggcttaccttcctcctcacacctcagagaatgtgtaagaatttatggtggagagagaccatatactcataaggagtatgtcgaaaccttttctcattctacagccctttttgtacacatgcaaactcaagatggagaaaaattctatgaatgtaaagcatgtgggaaacccttcactgagtcgtcatatcttactcaacatttaagaactcatagtagagtgttacctatagaacataagaaatttggcaaagcctttgctttttccccagatcttgctaaacatataagacttagaactagaggaaaacactatgtttgtaatgaatgtggcaaagaatttacttgtttctcaaaactcaacattcacataagggttcacactggagaaaaaccgtatgagtgcaacaaatgtgggaaagccttcactgattcatcaggtcttataaaacacaggcgaactcacactggagaaaagccttatgaatgtaaggaatgtgggaaagcttttgctaactcttcacatcttactgtacatatgagaactcacactggtgagaagccttatcaatgtaaggaatgtggaaaagcctttattaattcctcttcctttaaaagtcacatgcagactcatcctggtgtaaaaccctatgactgtcaacagtgtgggaaagccttcattcgatcctcatttcttattcgacatttgagaagtcacagtgcagaaaggccttttgaatgtgaggaatgtgggaaagcctttagatactcctcgcaccttagtcaacataaaagaatacatacaggggagaggccatataaatgtcaaaagtgtgggcaagccttcagtatctcatcaggccttacagtacacatgagaactcacactggtgaacggccctttgaatgtcaggaatgtgggaaagcctttactcggtccacatatcttattcgacatctaagaagtcatagtgtggagaaaccatataaggaatgtgggcaaacctttagtaattcctcatgccttactgaatgtgtgtgaattggggctgatacttggaaagaatgtggtaaagccactacttcctcacacttactgaacatgtactcattcatagtggcaatgtacacagtcataaggaatgtgggaagccttccttggtgtctcagatcttaacaattccaatagaagagaagacatatgaatgtaaggaatgtgggaaaatcttggctccttccataggccttactattcatgtgtctgtgcatcctaggaaacaaactgaacgtaggaaacctgtcgatgcttacatcttactgagtctgtttgaactcatgctggagagaaatgctatgaatgtgaggaaggtggaaaagctttcattattttcctcgggccttactgagcttgtgagcacattggatataaatgcacgtcctctggctgtaaggaatgtgttgaaacctttcactctgccttataccttaatattcagctgtgatctcacaagtgtgaaaaatcttatgaatgtaaaatgtgtggagattcttctttgtttttagcttccactttgggaacatgtcaaagcacacattgagaagtcccatgagtgaaagagatgttggaaagcccttgaacttggtcgttaggaaacatccacactgaagaggaacctgactgtatggaaggtcaaaaaggctgtattaatttacatgcaaaaagtcacactagaggaatgccatatcagaatgcttttggtaaatatacatgttttaaagaggttatatatcattaataaaaatatctagctggtctgaagatcctgagttatctcaattgttcacggttacagatggaactctttattattgaggagttccactctttcccccatttgtcactactacacttccctagtctttaaaacaattttaggctgggtgcagtggctcattcctgtaatcccagcactttgaaaggccgaagcgagtggatcatttgaggtcaggagttcgagaccagcctggccaacgtggtgaaaccccatctctactaaaaatacaaaaattagccaggcatggtggtacgtgcctgtaatcccagctactcgagaggttgaggcagaattgcttgaacccgggaggcggaagctgcagtgagctcagatcacgccactgcactccagcctggatgatatggtaagaccatctcaaaaaaagaaaaaaaaattaaaatatcctcagagggttttttaatgaaaaacttagttatagggaattgaggaacatttaggggtacaaattttcacttattgcacacaagaaaattggtactggccaggcatgctggctcacaccttaattccagcaatttgggaggccaaggcagaaggatcacttgagcccaggagttcaagaccagcctgggcaatatagtgaaacctcatcttgacaaagaataaataagattaactgggtgtactggtttgtgcctatagtcccagctatttaggaggctggggcaagaggattgcttgagcctggtcagggaggcagaggttgcagtgagccctgatcgtgccactacactctagcctgggcaacaggatgagaccctgtctcaaaaaaaaaagaaaattgacgccagcaaagaaaaccaaataaattatttaagtttgcctttctatatgtctttaaagactaatgatattgaacatcactttcatatgcttatgagtctttggtgaagtgtacatttaatgatcttttttcactgttgctgagaatctttggtttgaattattgaggcaggttctttcagtaagtttgagatataattgccatgtaataaactgcacatgtttttagcatacactttaagtttggacacatacacatatgtgtacatacacaccatcaagataatgaacatacctatcaaaccagatggtttcctcatgcccttttataatttcttcttctcctcacccttccctgcctgtcactctcctgatccactgatttgctttctcttagaatagacgactttatattatgtacagtttttatataaatggaatcatatagtctggcatctttcaggataattttttcagatccatttatgttgtagggtccatttcactgctgaatagtattccattgcaaggcataccacaagctatttatccatgtgttatttctaccttttggctattgcaattaaaactgccttgaatacccatatgcagattattctttaaacatgtgcttctgtttctttaaatagttaagagtggaatgatcagatcatatgttagtgtacgtttaagtttttaagagactgctaaacctttctcaagtagttatgccatttgacatttccatgagcagtatataagagttgcaattcttctgcatccttgccaattattggtatggtcagtcttttttattttgaccattttaataggtgtgtagtagtatctcatggttttaatttgcatttccctagtgactaatgatgtcttacatggtttcacgtgcttactggccttctttaagcctttggggaagagtctgttcaaatcttttgcctgtttatattggctttattttttatttatttttatttttttttatatagagacagggttttactctgtctcccaggctgaagtgcgtggcacgatcatgtggttttgcaatatttattgaattttgagagtttaaaatttgtaatatatttaatattaaacctattagtgtatttgatattaatactttatatttaatataatgtacatttaaatatataataaaacatttcattttaacagaggtaacataaatacacttcccaatttatggagtttgacttagtattgtttttaatttacaatggtgcaaacatattatgcattcaatatgtttctcaatttatgatggggttacaaattgtcaacttatgatagtttcaacttacaataggtttgtcaggacatagccctgtcataagttgaggagtatctgtattacaatatatttaatatgttgtacttgtggtacaagtacatggtgcactttgagttaaaatctttatatggcacaaagattggatcaaaatttggggttttttttttctttgtatctcattgttctagcatcatttattgaaaagactatcctttctccacttaattgcctttgcttctttcttgaaatattggttgtctttatacgtgtgtctgcttctcaactgttctgttccatatagctacttatcttttattccaagactaccctctcttgacaacttcataacttttgaagtccgatagagtttagtcttccagctttttcttttcagagttgtctttactattttaggtcagaggttggcaaagttttttataaaagaccagattgtagagattttaagctttacatgctatatatagtttctgttgcatattattttttctattacagaccttttaaaatataaaaatagttctcacattccattcaacctatacagttataggctgtgagccacatttggtcttgatgtggctgtaccttgttgacttacagctgttacaggactttcgtatttccatataaagtttagaatcaggttgtcaatttctaccagcaccaccccacacccccaaagtaattcactaagattttgattatcattgtgttgaatctgcagaataattgatgtcttcacaatattgagcatttcaacccatgaacataatatatctctccacttatttaggatttataatttttttctcagtagtatttgtgtttttcggtgtttgggtcttcctaggcattttttctctgacactattgcaaatggtattttaaaaatttcaatttctctgctagttcactactactatagaggaacacagtttttttacatatattcatcttgtatgctgcacccttgttaatttgttctggaagatttatattaacattatacttagaatatattaacattataataagctacataattttatttttttattttttaaattaaaatagagattggggtctcactatgttgaccagtcttgaactcctggcttcaagcgatcctcccatcttggcctcccaaagtgttgggattacaggcgtgagccactgaacctggccacaattttattcttaaatgaaaatagatctttgatatcatcgccagattcatatttgttttttgttttcttgagatggagttttgctcttgctgcccaggctggagtgcagtggtgccatcttggctcactgcaacttccacctcccaggtttaagtgattctcctgcctcagcctcccgagtagctgggattacaggcacccgcctccacccccagctaatttttgtatttttagtagagacgaggtttcgccatgttggccaggctggtcttgaattcctgacctcaggtgatccacccacctcggcctcccagagtgttgggattacaggcatgagccatcacgcccagctaccaaattaatattcaaatatatgttgccattacagagtgataactaaggacactttgaggtataggcatagctgtggtaaaaacagctctctccagctttgcatctaagttgtaaaataattacattgatgcttttaaacctgccatgtataatttttcaatgtattagccatttaataactctgagacagctaacatttaaataaatccctgtttgggaatggtatttgaacaaataatattgtgaacatatttgccaatttatactatattaagattctaaataatacagctatttaatatatcttgataattagtatttgaaataaatatatttctctgagtagccttttggaaaaagtgcacagaatatagtttccagtcatatgctacttttctaacttgcacttatctaaacatttcatcaggagagagttcaatagtacccgaaccaaaagtccagtgaatctgacttacccagtccccaatttggtttgcatgtctgcttacaaccatcatttctctgcagattttccacttagtctatcaaaaatcaatggtgcagcagttttttggagtctctgacaacaaaactctgtaaatctgcttcttccagtgtgagtgtctcatctaacaatctgaggataggacaaactgttgccagggacaggggaggacttcttttgagatccttggtagttttcaatgaagtctttgatatggcttacccttcctacttggtgaccctgtcctgaaaagagctggaagacaggcttcgtagacatatatgtttcatttttcttgtcttcaactttaacacccacctctttatcaaaaattccctgtaattctgaaggtaattccccctttttgatggagttcagaaactgctgacttgcaccatttgaataacttctgaaataattgttgacggtgaatccatttttccataattttatgtttacgtctacctgtttcttttgttaagtgggagacaagcatttggaaccaaccttctgagcttcctcaaaaaggctatcaacaaactattcacaatttgtttattgattatcaccaagaccttgattgtcaggtcctgtttcacaaacccagtcttttatactttcgagattatctacgtctttcattctcttttgcgttactccgagcacagcctccaagcctaggcctcactcagctcaggagccaccagcactgtttggctgcgagctccgtttggctggagcccttcagacccggagcgcctcgcccgagaccacctccggtaccccggctgcgctgctgatatcccgccggcctctctgtctccaccaagtgccaagcgttcacccacgcctgctgcctgcaagacctgaggaacgcgcatgggctttttttttttaagacaagtttcactctgtatcccaggctagagtgcagtggcatgagcttggctcactgcaacctccgcctctcggggtcaagcgattcttgtgcctcaccttctggagtaactgggactacacgcgtgcaccaccacacccagctaaatttttctgtatttttagtagagccagggtttcgccatgttgcccaggctggtctagaactcctaggttcaagcgatccacctgcctcggcctcccaaagtggtgggattatagacgtgagccaccgcacccagcttctggcagctttttagtaggttctatcatattttctactaggacaattctgttgtctgcatataaaattttttacttcttcctttccaatctgtatgcgttttgtatttttcttgttacattaaccagaacctgcagtgtattgttaaatagaaattgagagactagacattcttgtcttgtttctggtcttgggagtaaatcattgaatcttttaccatttagtaactatctttttaatcttttttttgataacacctattgggtgggaaacagtatttgtagttttttatttttatttccctggtggctaaagatttttattattttttttttctgggcttagctcgcctgaaaactaaagatattgatcatcttttcatcagtttgttgactatgtatctgtcttctttgggagaatgtctatttagatcctttgccatttttaaattgagttcttttcattattgggtttcaagagccctataaattctaggtacaaataccatatcaaataaatcgtttacaagtattttctttcattctttgtgttgtcctttcactttcttgatgatatcctttcgagtgtaaaagttttaagtttatttttttcttatgcttttggtgtcaaatctgagaaaccattgcctaacccaaggtcgtgaagtcttttatattttcttctaggatttttatagttctagctcttaaagttagttctatgatccattttgaactaatatttgtgcatgctgtgaacagtgtatccagcttcattcttctgcatgtaacacccagttaccctagcatatgtgttgaaaagactgtttatcccattgaattgtcttggcactcttgtcaaaaatcagttaaccataaatgtaaaggcttatttatttgttttgagactgggtcctgctctgttaacccaggttggagtgctgtggtgtgatcttggctcactgcagccttgacctcccaggctcaagtgatcctcctccttgagcttcccaagtagctgggactacaggtatacaccaccacgcctggctaatttttgtatttcttgtagagacagggtttcattttgttgcccagactggtcttgaactcctgggctcaagcaatcctcctgcctctgtctcccaaagtgctgggattacagatgtgagccactgtgcccagcattaagatttatttctagactctcagttcacctccattgtacatgtctaacctgtttgtaaccacactgtcctgattactgtagctttagagtaatttttgaaattgggaagtgcgagcccttctgtgatcctttttgcaatgcacgggttaaggttacttttggaggtggtagaagggatacgaatgttttaatttttttttgcacgacagttggttgaaaacagtcttttctctattggattatttgtaccttttttgaaaatgaaattgatgacttatgtttaaatctatttctgggatctattccgtttcagctaatctatgtgtctgtccttttgctaatactacactttttttttttgagacagagtctcactgtatcacccagactggagtgcagtggtaccatctcagctcacggcagcttccacctcccaggttcaagcaattcttgtgcctcagcctcccgagtagctgggacttgtgcctgagcctcccaagtagctgagactataggtgcgtgccaccacagctggctaacttgtgtttgtagtagagacagggtttcaccatgttggccaggttggtttcaacctcttggcctcaagtgatccacccacctcagcctcccaaagtgctgggattacaggcgcgagccaccgcatctggcctgcggatactatacatttttgattatggtagctgtctagtaaatcttgaaagcaagtggtgcgagagttccaacattgaccttaattttcagaatcatttgggatggtccgtgttttttgttttttcacgtaaatttttttttttttttttttttttttttgagacggagtctcgctctgtcacccaggctggagtgcagtggtgcaatctcagctcactgcaagctctgcctcccgggtttacgccattctcctgcctcagcctcctgagtagctgggactacaggcgcctgccaccacgcccggctttttgtatttctttttttttgtatttttaatggagatggggttttaccatgttagccaggatggtctcgatctcctgacctcatgatccacccaccttggcctcccagagtgctgggattacaggtgtgagccaccacacccggccttttcacataaattttagtgtaaacttactggtttccataaaaagcctgccgggatttttttttttttaactgagatttggtttaatctaaagatgaattagagaattggcgtcttaatactggctgttctgaaccatagacacagtatatctctgccgtggtctgaatgtttgcatacccgcaaaatttatatggttgaaatcctaatccccagtccaatgatattggcaggcgaggccttttggagatgattaggctaatgagggcagagcactaatgaattagattggtgcctttataaaagagattccagagagcttgctcatctcttctgccttgtgaggacacagcaagaagtcaccatctgtgaaccaagaagtgggacctcatcagatgccaaatctgccaacacttcaatcttggacttcccattctccagaactgtgagcaatacatatctgttgtttataagccatctagtctatggtattttgttctagcagcccaaacggactaagacaatctccccattaatttaggtcttatttctttcaacagtgttttgtggttttctgtattgcaccatttcattgatggtattataaatgctagttttaaattttcaattttttagtgctagtatataaaattatttatatttatatataatttatatttgaccttgaatcctgcaaactttttatagttatctattcctgtaactttttggaatattctacataaacaaatcttatgctctgtattataaaggcagttttgctttctctctgatatctgtcccttttatttctttatattttcttaatgtactggctagggcctccagtagtgttgaatgagagtggtgagaacacacatccttgtcttattcccaaccttaggcagaaagcgttccgtcttctaccattaagtatgatgttagctgtgggtttctttgaagacagctttattaggttgacgaagttcccttccactgcttgttcactgagagattttatttcattttttattttttcagcatttatttatgcattttaatttttttcttttcttttcttttttttttttgaaacagggtctcactctgttgcccaggctggagtccagtgatgcaatcataactcactgcagcttctaactttgggctcaagtgatcttcccacctcagcctcccatctagctgggactacagtagttcactgagagattttattatgaaaaccttttatcatagaaccatttcttaagacctcagagacctttagtttggtgtttgatagagtcttatgaatagatatcgtatgtagaagttcaaataaggtgcgttttcattaaccaaaagagtatctcagcatcccttctgggcattgttcccctgcattctcacagacagtggtccaagatagagaagggcctaagagattttagccatgacttttgtctaatgacacaaatccaataaaattaatggagataaatgggaaaaggttttttattgcaaaaaaaaaaaaaaaagttggcaaaagcaaggtcaactttgtccaaacaaaatggaaagaagtagtacaaaatgtaaagagacctttgaacccccaaactgcagatagcaaacagatgaaataggcctataaaactactcagttgaaaatgtttactttttatgggaaagcaagtatgattcagagtacagaacttcagaagactcactcctgtggagctgcactggtgcttgagaaacagataacatgttcctgcctgaatttaagaattgctgtgggtcaggggctgctgtggaatcccatttctccccacccatgcctttttaataggaatgtctattttaactatcccattcctgtctcaaactctgtattggttttgtggggaacagataacttgtctctttagcttacaaatgttcaaatctagaggagcaggagtatattcaagaaaccaaacccaaggacttttttatgatttttatttatgttttattgttatttttaaatttttatttttatttatttatattttgagacagagtctcactctggcacccaggctagagtgcagtggcacagtgatcttggctcactgcaatctctgcctgccaggctcaagcgatcctctgcctcagccttctgagtagctgggactataggcacatgccaccatgcccagctatttgtttttttttttttttttttggtagagacagggtttcatcatttttcccaggctggtctcaaactcctgggctcaagctgtcttcctgtcttggcctcccaaagtgctgggattacaggtatgagccactgtgcccagccacttttcaaaacattttttgagacagggtctcattccatcacccaggctgaagttcagtgatgcagtcatagctcactgcatccttgaattcctgggctcaagtgatcctcctgcctcagcctactgagtagctgagactacaggcacatgccaccacacccggcatgtgtttgtggggggtaagaggggtcttttttgctgttcttgccagggttggagtgcagtggcacaatcatagctcactgcagccttgacctcctgggcccaggtgatcctcctgcctcagcctcttgagtagctgggaccagaggcatgtgccaccacgcctgactaatttttgtatttttttgtagagagagggtctctctctgttgaccaggctggtcttgaactgctggactcaagggatcctgccacctcagcctcccagagtgctgggattacagacgtgagccactgctcttggccgtcttttctggattgcaccttatttggatgaccagatcctggacataaaaccagagtctactaccacgggcatgagactttggtgtggccttaggaagtggtgagagtttcttgtacatgggaagtataaatattaataatttgtagccacatgcagactccgatggttttaaaacacggccctaaaattctttgatacttttacctcccccttgtatctgcactgacctttgactgcatttcccaaaggagtacaacataaatgattccatgagatttccaaagcaaggccacgaagggccatgcggttcccttctggctggaacattccctcttgagatgcttcctcctctcagagtgcttcctcttgggaactagcagctatgctgtaacagggaggggttacatgtagatgctgccatcaacagccaccagctgctgtctgttttttagccatttcagggaaaacatcagatacaagagtgataatagaatccagatgattccagcccccagcctttggattcagcatcagctgtgtaagacttcccagctaggccctggacattgtgaggcagagaaaagccattcattcctcctgtatcctgtccaaattcctgccccatgatctgttaacataatagagtagtagtggttctgtaccagcagttctcaaccttttttatcttgagactcttttatactccaaaaattgagcaccccaaaaagcttttgccaatgggcattctatctgtgaatatttaacattttagaaattaaggcaggccaagcatggtggctcttgcctgtaatcccagcactttgggaggctgaggccggcggctcaactgaagtcaggagtttgagaccagcctggccaacatggtgaaaccctgtctctactaaaaatacaaaaaaactagccagcatggtggtgtgtgcctgtaattccagctactcaggagtctgaggcaagagaactgattgaacccagggggcagaggttgaagtgagctgagatcatgccactgtgctccagcctccagcctgggtgacagagcaggacttcatctcaaaacaaaaggaattggggcaaattttaaaaatattttagtaatatacataacatgctttttaaaaataacttttccacaatggcaacaaaataatgtggaaagagcgacatattgcatgcttttgcaaatctctttaatgtcttaagagcttaatagatgacagctgaattctcatacttgtttctacattttttgccattagttgctttgattagaaagtttggctttgctgagatacgtagttggaaaagagagaagcattttcaggtaattttggattttctttgatattacaccaaaactcaagaaatggtagtttctgaaagattagttgcaatatggaatgaaatcctgttaaggaattgtttctattctgttacattaaaattcatttgtttgtcttgcactatttttttcttttccttttatttatttatttatttatttttgagacagagtctcgctctgtcgcccaggctggaatgcagtggcgcaatctcggctcactgcaagctctgcctcccaggttcacaccattctcctgcctcagtctcccgagtagctggggctacaggctcccgccaccgcgcccggctaattttttgtatttttaatagagacggggtttcactgtgttagccaagatggtctcaatctcctgacctcgtgatccacctgcctcggcctccgaaagtgttgggattacaggcgtgaggcactgcgcccggcctttttttttttttttttttttgagatggaattttgctcttgttgcccaggctggggtgcaatggtgcgatctccactcactgcagcctccgcctcctgggttcaagcaattctccagcctcagcctcctgagtagctgggattacaggcacccaccaccacacctggtgaatttttgtatttttagtagaaacggtttcaccatgttggccaggctgctcttgaactcctgacctcaatctacccgctttggcttcccaaagttctgggattacaggcatgagccatggcgtccagcccatatcttgcactttgattggctattttatcaatgcatgattttataccttaatacctgacttagaaaatagggctggcacagtggctcttgcctgtaatctcagcacttcgggaggccaaagtaggagaatccttgagtccaagagttcgaaagcagcctgggcaacatagtgagaccctcatttctaaaatgaaaggaaatagtcatttacttcattatgcagatctttcaaatgtttacccattttaaagtacagtgtctaaaataaaccttcatgaacatgaccattgatcctatcagaaaagtttttatgcgttgagacgcttctaaggtgacagatctaagctttccaacttttgctgttccttcaaggacatttttatttagcctgagtgtggggcagtgaggcattcagtgactgcgcagttcagtgccactgccttaattttttttttttttttttttttttgcgatgctgttttgctctttttagccacaggctggagtgcaatggtgtgattcggctcactgtaacctccgcctcccgggttcaagcgattctcctgccccagcatcctaagtagctgagattacaggcgcatgccacaatgcccggctaattttgtacttttagtagagacgggtttcaccatgtttattaccaggctggtctctaactccttacctcaggtgatccacccaccttggccttccaaagtgctgggattacaggcatgagccaccgtgcccagcccactgccttaatttctgctgaggcaccagcgcttttggccacttttataatgtgtcatcagtataaatgtggatatggtgaaaaggtcaagaatgtatttgtgctattataacaatagttttttttttttgtttttttgtttttttgagacagagtgtcgctctgtcacccagggcgtgatctcggctaactgcaagctccgcctcctgtgttcacgccattctcctgcctcagcctcctgagtagctgggactacaggcacccgccaccacgcccagataattttttgtatttttagtagagacggcgtttcactgtgttagccaggatggtctccatctcctgacctcgtgatccgcccgtctcggcctcccaaagtgctgggattacaggcgtgagccaccgcgcccagccataacaatagttttaatctcacagaccgcctgaaagtgttttgggtccctcagcagtttaccaaccctgagaactgctattctgtatcacttaagtttgaagtggtttttttacacaacaataataatcagaaccgaactcatatcccttttttcttcttctttttgattattagtttcttcagtgtactagatggctgactgggaagattccagggtcccaacaggcttcagagttgcgaaggctctagaggtactgtttgctcacatagagcctaggtgttgagggcttagactctggagcccagctgctggaatgtgggccctgcagctgttactgttgagctgtgtgtctggagcccttcccttagcctttcctgagtctcattctccgttggttaaatgatgtcattaataaggcaaatgattttgttgctaaatgccagtggaaactttctaatagtcataactgtcacaaggtctgatgacctcacagttattttgcccttaacggatgccataaaatgcccgaaaagctttcccggggtcaactcacttcattacaactccctgagggagtaccattgttaatgtcttatgtggtctgtgtactatgaaatatccaccaccatctctgatggattccagcgcaccttgtttcacttgagtctgtccagtctttagagttaacagaggaaccctagttactgattccagactttgacctcatccaaaattaacagcagccaatttgcattcttctgggttatatattgttggccaaatattcagaattattgtgtgcctctgggcagagaactcacagttcaaaatatcttttttgttttcctttggtacagggtcttgctctgtcacccaggctggagtgcagtagtatgatcatagcttactgcagcctccacctcctgggttcaagtgatcctcccacctcggcctcccaggagctgggactacaggcacaaatcaccatgcccaaatatatatatatttttcaatctcctatttctttcctctctcttgttttggaagttactcagcaagctacatctgtctaattggatatgtatgtccatatcctgttagaatcaagtatttcagagtataagcatgatagtaataaagctcgcaatattatcattaagccacttactttagagatcccatgatgaacccaaagtctcccctattgcggaccctggagaccggttaagtctaggagaaataatatcaagatttagactgatctttttttccccaatctctttgcctctgagtaaccattcttcaaattcagaaccacactcagggtaaaatataagtaagggctatttatttttttgccactgttttggcatctgtagacaatacagtttatttaatttcaggttttcacagttatgtacagtcatacctcggagatatgtgagttcgcttccacagaccatcatagtaaagtgagtcatacaaattttttggtttcctagtgcatataaaagttacgttggctgggtgaggtggctgtcacctgtaatcccagtgctttgagaagctgaggtaggaggatcacttgagtctaggagtttgagaccagcctgggcaactatagcaagaccccatctctacaaaaaaaatgttttacatcagtcaggtgtggtggagtagctgtagttctagctattcaggaggctgaggcaggtggattgcttgagcccaggagttcaaggctgcaataagctatgattgtgccactgcattccagcctgggtgacagagtaataccctgtctcaaaaaaaaaaaaaaaaaaaaaaaaaaatgctgagcgtggtggttcatgcctataatcccagcactttgggaggccgaggtgggtggtggatcacctgaggtcaagagttcaagaccagcctgtccaacatggtgaaaccccattctctactaaaaatgtaaaaattagccaggtgtggtggagcacacctacaatcccagctacttgggaggctgaggcaggagaatcacttgaacgcaggaggtggaggctgcagtgagttgagattgtgccatggcactccagcctaggcaacagagcaatactgcatcttaaaaaaaaaaaaaaaattatagtctattgtgtgcagtagcattatgtctaaaaaacaaaggatgcaccttaattgtaaaatactttgcttaaaaattctgacagagaaacaaagtgagtatgtgttattggaaaaatggtgctagtagacttcatcagtggccacaaaccttcaatttgtaataaccttcaatttgtaataaaaataaaaccccacacgttatctgcaaagcacaataaaatgaagtatgttacatgttgattttcaggaattagaagaaaatgagagtattgttgtcatcggaaataagaggattgttttgccaagctactgaaaaaaaaaaaaactttcattcctttgtcaactgcaagaatggtaatatttgacaagaaaaacccaacttgtcaaatactacgattcttgcagttgacaaaggaatgaaaagttaatagcatatgtgaggctggacacggtggctcacacctgtaatcccaacactttgggaggccaagacgggtggatcacctgaggtcaggagttcgaggccaacctgaccaatgtggcaaaagcccatctctactaaaaatacaaaaattagccaggcatggtggcaggcacctataatcccagctactggggaggctgagacatgagaacaggttgaacccgggaggcggaggttgcagtgagctgagattgcgccactgcattccagcctgggcaacagagggtgactccgtctcagaaaaaaaaaaaaagtatatatgagcatttaacaaggctataggttttgattttgagccctgaaaacccccaggtttagtttcattgggaatttgtattcaaacatgtctctgctctggatccataggtggcacaattttgccagtttttgatgcataaatggtgacagtatcctttaacaaaattcctaaagtagtcttttaaaaaaataattctgaaaatctggccaatgataatacaggactcggaagaaaatactacccattgaaattggaaagcctgttttcaatttggggtctgctttttttttttttaattgctttaagagattaaggattttagacacaaacacgtcataaagtgtttttagatttgcatgaacctactgtggtttagtataaataaacccctaacatgagtgttacagatgcctgtgagggtatcttgggggtttctacactgcctaccccaaacctgactgcagtcagagccaacagggccccacgtaggcaaaggctatgtcattaattctcaaatgagattcgtccaagcgggaaatgcacatctagtgcagtagttttaggccagcctttttcagagcctcaggctctgcctgtcaccttgaagacatccatgtgggtcccctcagggcttctctttgccataaaaataaaatgattgctcccaccaatgtttgcgtccatgggagaggaggtaggagcagcagtacttgtcctgtgtgtgggagacacttgaagggctcagtgggaattgtcagcagcagggaacagaacaggtggtgagaagagtcattccactgagtttctgggcctttgactccctgaaacttccttctcctctatccaacctccctctccagaaaaaaaaaaaaataatttaaaaatggaatcagtgtaatcagtgaagtagctgtattccagtgaacaagcagcctgcccttgcatctgcatgcatgcagccttggcgttttctctagaaaaaagagaggttctacctcgtgcatgaatacaggtggaggccaagaccagcattaacaaaggctgtgtgtttgccatggagctcaggagggctaacagtcattttacttctgcctccgaccatcacactttgtccccagaacaaagccaagagtccttggtcaatgaaagtgtgtaaatatcctcacacttcccctagtagttcctttttaggctgtaatcatgtgctaaagaaaagaacctaacttcttaaaatctttccctttttggatgtagattgaaatttttgttttaaacacaatggccctaatgtctaaatctaatgttagtaattaatccctagtgctttaaggatcttctgtttataggcagttattttatggagctggtctctgtgagaggcacagactgccaggaggggttgagatttcctttaaccaggattcttagttctgaatggctctagtgaataacattaacaatgattctctggccgggcactcacgccggtaatcccagcactttgggaggcctagacgggtggatcacttgaggtcaggagttcaagaccagcctggccaacatggtgaaaccccgtctctactaaaaatacaaaaattagccgggcatggtggcagccgcctgtaatcccagctacttggtaggctgaggcaggagaattgcttgaacctgggaggcggaggttgcactgagcccacagtgcgccactgcactacagtctggatgacaagcaaagctcaatctcaaaacaataatttttaaagtaatgattatcttaaccattcttaaatccttctgtctagtaggaatcttattcatgggagtgtctggaaaagggacaaagagcggctattgagatttttttaaagcctggatttgggatgtctgaacagtgaataactccaaagccatttaaaaatcatctttttttctaccaccggactgagcttttcagttttaattccaaggttccaatcatatagatgtgagtcaaaccctgttgggccaaacaggatctcctttgttggcggataatttcaagtgctcacagagaccctccgtttttttttaaatacctggacttaattgtttaaactggagtccggaccaaaacatctctgacctcgggggtcttcctttggtcaggaagaggggagggagcaattggacccctttccctctgcggctgcagagtccaattttcctctggggacatttgctttttcccttggggaagacagtacggattctagttctgtggactcttttacttagctttgagacccaagcaagttaattggcttgtgcctcttattttactctaatgcaatgaataaagacagtcccagccttcgccctaagggagcaggagcacctgcgatgccccgttcccaagtcctcagggcgaatccgccaaatgtgcgagctgggcagcccacccctttcagctgctggccggaagcggaagtgggcgtccgtcgcctcgccatctcccatagctgtcgcctgcagctgagaaagggttgctgtcccagcaggccaggtccaggtgcgccccactagtgaggccggcggaatcgggagggaaggggtcaagggcacagtgcgcagccccggctgctccagaccttgcctgcagcttcccgccccagcctccggctatcgcggcgtttcttctcagaggccgccggctttggttcctcccggcactgctgggcttggggctgccattccgggcattggttcccgggaggaggcaagtgggttcatgtggtcagagtgcgtcggcggggccttttctccactttctgtacccttctctttaaacgtcgtccccagtaggagactattttttctcaagaaaatgctctcttggacctcactttccgttgttagaaggcatatcttgggatgcgcgttattggtttgtggagatcgtccctttttttcccctctgttatgtggatgcaccctagtgcctgatacacatttgagttcctatctgagtgggcttgtgcatgttttttcgtatttgtggacttaggtcttcaaggtttatttttgaaagtcaagttgttgggtcaaagcataaatgaatgtgtaattcctaggtatgaccagatccccctctatgggacttgtgcttttttgagccctcagggtgtgttttgtatgcagcaagcagcagaccttagttttcagtttacctgtagtttcttttggatgtttacatattgacatatcgtttatgaataagaactttattctccctttataatcctattacgacccactcctgccctacaaatttactgccctgcctacgacctccgaaacattagaaggagcaatccttgctgccttccaggtctcagaaagaaagctttcagcttgtcactacttacatgtttgctatgtgtttttgatagattaaagacattcccttctgtaacagctttattgacataaaatcatatatttcatctcatttaaagtgtataaatcagtggtttttagtatattgagttgtgcaaccatgactacaatctaactctagaacattttcattgccccaaaagagaatcccatactcatcagcagttactcccccatggttggcaagtttttgggctctattcttgagtttttttatgttgtcatacaccaggtcagattgatttaggtaaaaacaacactcttcatttaagaatatacagatgttctccttttccagcagtaagtcaaggcctcggcggttttggaggacaactgcagctagagtcaacttgggcctggaggactgatgaagtttgtgatatgactgtgatgctagcagagaattcattagagagactatggaaggtcctgacagaggttgaaatgcctgctattccagtaccgagagcaatagtggaggcagaaagtcttaaactgacaagggaattagtggaataactctttttgtcgtgtcggtgtcatgaggggaacagggagctcttcagtcctatttgcaaattgcattttgagagtaaggaaaactagtgtgcatgtgcctgtccaattagcaggtagacacatgtaggtagaggatccacagaggaaaaagagaccttgtgcgaggcaaaactggagatgcaaagtaaaaagatgaggagtgctgaaaggggtgtcttgtacttagaatcctagggatccagctagggcggcagtcgtcagaggttgtaatggggactgatgaggtaattgcgtcgagggggaggttcgattttcatggtgtatgagaaaacgtcgagtatctacaagcaacctttcactgttattttcagggctgggtataagtaagcaagaagagggcctgggagaagagtctgacgagcaaggggaaggtagccaaggatggagtgaaatacagggtaagtgtcttcctaagcaataattactgctaatgtttttaagtttgccactactgatagagggcttgtctgtaatatggagctggaaggctccaattgtttcagtgatgtgtgtagttgggctttggagatgaagagtaaaggaacatcgagaaggtgaaagtttacctaggggaattccagtgggtctttgctgagagatacataaaggagctgccacaggaatagtagtttgtgttgtgagaggtctaaatatggggggagtagagttgatataaggaggaaggttttaggtctttaagaacacaggctaagggagaagggggaatggagggcagaagcttgcccatagtgaaggaggcaagcccagaaaaaagagagagtagagacatggagagaaggggtgggggcttcttgtcctccagaaaagcagagaaggggtagagacacagagagaagggaccggggggttcttgcaccccagaaaagtggagaagggctagagatatggagagaagggttcaggggttcttgacccccagaaaagcggagaagggtagacacatggagagaagggggtcagggggttcttgcccccagaaaagcagtacttgccgctaagggtgaaggaccaaggcaggcatccccacgtggtcagacacctctgaaatgtgggtgaataatcaggcaggcgtccccgcatgattaaacaccaagggaagactgtcttcccgagtccatgaccggcgccggagttttgggtccatggataaaacacgtctcctgtctacgagaaaaggaaaggaactgaaattgagagaagggagagattgaagtgtggcgccaagattgaaatgagaaagaggttgagggatagtaagagaggttggagaagagagtaaaaagaggccacttacctgatttaaaattggattgatgttccttggctggtcggtctgaggacctgaggtcataggtggatctttctcacagagcaaagagcaggaggataggggattgatctcccaagggaggtccccagatctgagtcacagcaccaaatctacctctgtcgccaggctagagtgcagtggcgcaatctcggctcactgcaacctctgcctcccgggttcaagtgattctcctgcctcagcctcccaagtagctaggattacaggcatgctccaccacacccggctaatttttgtatttttagtagagacgttctttcaccatgttggccagagtggtctggatctcctgacctcgtgatgcgcccaccttggcttcccaaagtgctgggactacaggcgtgagccaccgtgcctagcctcattcctttttttaatgagacaaggtctttctctgtcacccaggctggagtgccgtggtgccctcgacctccctagctcggccttccaccttagcctcccgagtaggtaggaccacaggtgtgggccaccaagcctggctatttttttaaatttttggtagagatgagatctcactgtgttaccaggctggtctgaactcctgggttaatgtgatccacccactacagcctccctaagtgctgaggattacaggcatgagtcaccatgcctggccttcattttctattgtcaaatgatagtccattgtatggatataccacattttcatttatccgttcatcggtagatagacatttgggttgtttctcctttttggctaatatgaataatgctgctgtgaatatttctcttgggtatatacctaggagtggaatgccttgttcatgagacgaacttttatgtttaatcttctggtaaaatgctaggctgtttgccaacgtggcagcaccacttcccacttcactcccctccacaaaaaaacaagagaatttctccacatcctcatccacacttgtctttttaattacactcaccttaatgtgtgaagtggtatcttaatgtggttttgatttgcatttccctggtgtctaatgatgttcagcatcttttcatgtgcagttgacctttttatctttagaaaaatgtacattcagatcatttgcccatctttgaattgtgttttcaaaagtcagctgaggctgggcgtggtggctcacgcctgtaatcccagcactttgggaggcccaggcgggcggatcatgaggtcagcagatcaagaccatcctggctaacacggtgaaaccccgtctctactaaaaatacaaaaacatagctgggtgtggtggcacgcgtctgtagtcccagctacttgggaggctgaggcaggagaatcacctgaacctggcgaggttgcagtgagcagagatcgcaccactgcactccagcctgggaaacagaccaagagtgtctcaaaaaaaaaataaaaataaaaataaataagctggctgaattaaattcagcccgaaagttttcaggttgaaaaaatttatttttgaaatcattatgtgatactggtttttatcactttgagttgatcatacaatttttcttttgctctattaatgaagcaaattatattgattttctaatagcaagcatctcttgcattcctctggtaaacctaacttaattctgttgtactatatttcctatttattgacattttttgtttggacttattttccttagaatatctgaatctatgttgaaatttgcctataattttgtttacttaaagtggccttgtcatgtttgatatcagtatgccaatctcaaagaatattcttccttttatactcttaatcacggtaatccctttgataagttaaactgttttgtgaaattagtttaaaagtgaccatatttttttcccttgtaatattgtaaactgctgttaatagaataaccaaaggcaaacatgacattttgaaccatacacaattctggggtttgcataaaggctatattaaataaaaccttccagatacccagctcttgcctatagagtggataagttatctatacctgaaataatgcaaacattagtgacaaattacattgaagtgtagtttaagtaaccagtcttcataaatatgcctaatctctggaatattttcatccagactggaattctttcttctttgagtggcataactgactgataaagcctttgagcatggtgttttttggtgaaaacctaaataatctagttttgttttctgttttaaaagaatatctgggcagtgagttaagctgggaagacctagcaccttgctgacgggatcagtctagattcttcttttatattttttaaattgtggtaaaatacctaaagccaaatttgccattttaatcatttttaaatgtacaagtcagtggcattcattgcattcacagtgttactcaaccatcaccagctagttctttttattgtaatttctacacagttttggtaagttgtatttctgtaggaatcaatttatttcctgaaagttttgaatttgattaaagttattcatgtcttgttaatctctgcaacatttgtagttgtgtttttctccttttgtctttgaagaattttgcccgatttttttcctagtagttttcaaagaaccagtttgtagcttgagtgatactgttgttttctagttcatcatcgtattttctgctcttcccgttccagctgcttaagttaatttttaagttcacttcttttctaatataaacatataaagcttatttttttcctaaggaccagtttagctacattctacaagttgtggtacttagaactaatcaataaccatagtattatgtattttctaattcaattcttttataaaagcataagttatttggaagtgtgatgttttctgaattccaaatgtgttacttttttctgtttgcttgaaaaatatgaaaccactaatattcaaccatattttaaaactaccaaaacacccatttcatatagttcaatgtaatctcgttattaacttacaacttagttacattgtaattaagacatgtcagagaacatgtttgtataccaaatctttttctaagttttaatttttgtgggcacatagtaggtatatatatttaaggggcccatgagatgttttatataccaaatttggaaggtttaagactggctttacagtatattcaccatacagtatggtcagtttttataaacacttcatgtgtgcttcaagaatctatgtatactccatacattcagtagtgtccctcagtgtgctagattaagcatactcattgtgttgttcaaatcttcatatcctttttttcatatgatctttctattgctgagcagtgtttgaaagtcttatagtgatgatttgtgttatttatcctttaattgtgctagcttctgctttataagttttatgagactagaattttatatcttcctaattggtactttacatcctcatgtcattacctctaatagtgccttttgtctcaaaatctatgaaattaatttagcaaacaaactttattttggttaatattcacctggtatatctttcttatttttgagactcaatttttatgtgttgttgtggattttagtgcatctaatgaaataacatagagctagtttatcttaatctaccaggacagtctgtttttaaactgcagaatttagcccatctgtacacttactgttattgatacagtcagacattttttaccatcttacattttacattgtgcttttcatttgacctattttttttgtttcatttcccttatttttcttacctttggaattgagatttttttttaacctaattccattttctcttctagactgtgagttaaactcactatgtccatcctttgaattgttaccctagctattttatcatgcatacttacagtctaaacctaatcaatattgtgagtccccagtggaagaatacaaggaacatactactcaatcacctccttcccaatttatatattatttagtattaggattgagcttatttttccatgtcacgaatttggtattattaccattttatataataaaggtttgcttaattttatccattttacctttgttcattctacttaacattttgggtcttccagttcctatctcctgaagtacttttaagttacttctgtgatggtctttttggatgggtaagttgtctcaggtctttattttaaaatgcctttatttgactctccatttatttttcttaagcttttaatcatgaaaatttttaattctccacaaaagtagaatagtacagttgtctctcatatccatgggggactggttccaggacccccacatggcttccaaattccacagtcacaaattccttatataaaatagcattgtatttgcatagaacctacacacatcctcccatagatgctattttttccctcccatttactttaagtcatcactagattacttacagtacctagtacaataagtgttatgtaagtggttggtttgttttttttttgttttttttttaagagatggggtctcattctgttgctcaggctggagtacagtggtgtgatcatagctcactgcagcctgaaactcctggactcaagtaatcctcccacctcagcctccctagtagctgggaccacaggcatgcgccaccacgcctggataatttaaaatagatacatatttttgtagagacagggtgctgctttattgcccaggctagtctcaaactcctggcttcaaggcatcctcctgccccagctttccaaagtgctgggattactggtgtgagccactgtgccgggccataaatagttatgctgtattgtttaaggaataatgacaagggggaaggtctacatgttcagtacagacacaagcattcatcttttttccacatatttttgatctgtggtcgagtagccaacagatacagagggctgactgtataatgaattctcatgtccttaacacccagctttgacagttaccaatattttgcacatcttgcatcatctagcgctgagctgtccaatacagtagccactagcctcatgtggctattgaagtttaaatgctcatttcaagtattcagtagctatccgtacatgattagtggttactgtattagatactgcaaataaatattgaataatgctgggttttccccccagatttgtttttaaagcaaattccagacatcctgtcatttcatcagtatattactaactgtgcatctctagttggttcatcaccactactccattatcccacctaacaaagtctgacgttccctgattggctacagaatatctttttacatttggtttgttcaaatgagaatcttaacagggtcccaacattttttttttattttagaccccttaagtttctattgtgtctgttctcttcctcctcccttttcatttttttaatccactgatttattgaagaaataaagttatttgttcttaaaatgtcccacatcatatatggattttgctgactggtttgttttcattgcttaacctggttatctttgtatttcttataaagagtagttagatagtttgtctagcgttttaggttgataagttatttttttctcagcatactgaagacattgtcctgctttcttctgacgtccattgttgctgttgagatgtcagctatcagtctgtttttccttttataggtgacctgtgtttttcccctggctgctttggaaattatgggaaaaaatcaaataccaaggaagaaaaatctataatgaaattagatgtggatttctttttatgtattcagcttgggggcttatgatacttctagtacccaaaggttagtgtctttcactaattcaagaaaattgctaggttttcatctaatagtgcgatcaaagttctgatctggtagttaatactggcactgaatttctcatttcagtgagtttatttttcatttctaaaaattgttttttaaactaaccattttatagtatcttaatctatatccattcaaatttttattaagcttttatatattttaaaatatatctaaaagggtaatatccaaagtgttatgctttttaccacctgacacctgtgtgttagctatgtcttacacatggtacattgtgtatttgtgtttcacaatttcttaaactgtgccttcctcaatttacttagaactttgtatataagattttttctcaagacctgacttaaagttgattttccagagataggtcgatttgcttgcactagttgcttggggacaatgccacttaggaccctctttaagtgaaattattcccttgaggttgtttgaactacagaaatgaatttggactgaaatctaaaagagagcacttgtgtatacagatcctcaagagagatttgctttttattatacctgatgggtacagttccttgcttcacgctttcatatggaaattttactttctttttaaaaaactgttcactgtggattttcagtcatacctaggaatagagtgctataaagccactatgtacctaccacccagcttcaatgattgtcaccattttgccattcttattacatctgttctctcccttgcttcctttcatcattgagctttcttttccttttttttttttttttttttttttgagatggagtcttgctctgtctcccaggctgaggtgcagtggcatgacctcagctcactgcaacttctgcctcccaggttcaagcaattctcctgcctcccctcccgagtagctgggattacaggcacctgccaccacacctggctaatttttgtatttttaatagagaaagggtttcaccatgttgttcaggctggtcttgaacctcctgacctcaagcaatccacccaccttggcctcccaaagtgctgagatgacaggcgtgagccaccacaccctgccagttttgtttttctgaagcatggttttccagctttcttgaggtataattgacaaataataaaaattatatatgtttaaggtgtacaacataatgttttgatctacctgtccattctgaaatgatcatcacagtcaagctaattaacatatccatcccctcacttacttttgtaagatgcactctcttggaaaatttcaaatatacagtacatcattaactatagtcaccaagccatacatcaggtctccaaaactcagccatcttataacagcaaatacatacccattgaccaacatctccccatttcccttgccccttggtaatcacctttctaatgcttctaggagtttgacttttctagattccatgtaagtgaggtcatgcggtatttgtctatgtccgccttattttacttagcatgatgttctccaggtttccttcttttttaagactgaataacccactgtgtgtatatatatgacattttctttacgcattcagcaatcgacaaacacgttgtttccatatagcagctattataaataatgctgcaatgaatatgaggtcacagatacctctttaagatattgatttcacttcctttggttatatacccagtagcaggattgctagatcatatggtagttctatttttaatattttgaggcacctccactactgctttccataatggctgtaccaattttcacttctaacaacgatgtataagggttccctttctccacatccaacacttgttatcctttgactttttgataatatctattataacaagtgtgaggtagcagccaactatggttttgattggtacgtccctaataatgtgatgttgggcactttttcatatacctactggccatttttatttcttctttggaaaactgtctatttagatcctttacccattttttattccatttttttctatcgaactgtatgtatttcgtaaatattttaaatattgtgcagattctttctcccattccataaggttgctttttcattttgttcattatttcctttgctgtgcagaaactttttagtttgatgtagtttcacttatttttgcctttcttgcctgtgcttttggtgtcaactctttaaaaaaaaaatttgtcaaaattaatatcaaagagcttttcccctgttctagaagttttatgatctcaggtcttacatttaagtctttaatccattttgagttgatttttgtttgtagtttaaggatctaatttcactttttcacatgtggatatctagttttccttacaccatttgccgaagagactgtcctctccccattgcttattcttggcatctttgtccaagattagttgaccatacatgccagggtttatttctgggcttcctattctgttacatttgtctccgtttttatgccagtaccatactattttcattacagtacctttgtaatatatttgaaataaggaagtgtgatgcctccagtattgttcaagattgctttagctatttggagtttttgtgtttccatatgaattttaggattgttttttctatttctgtaaaaaatatcattggaatttcataggaattgcattaatttgtagatcacctttcatagtgtgacatttgacaatattgattcttccaatccatgaacactgggtggcttcccatttgtttgtgtcttctactttcaccagtgttttagaattttcagtgttgagatcatctccttggttaaatttattgtcagtattttactctttttgatattattataagtgaaattattttcatagttttttttagatagtttgttagaaatacatttaatttttgtatgttgatttttttttaccctgcattactgaatttacatgttagttttaacattttttcatggtgtctttagggttttctagatacaatatcatgtcatctacaaacataattttacttcttttccaacgtagacgccttttgttttcttgcgtaattgttctggctagaacttcagttgtatgttgaatagaagtggtgaggatgggcatctttgccttgttcccaatcttagaggaaaagctttcaattttttataattggctgtaagctgtggttttgtcacctatggcctttactggtgttgaagtactttccttctgtaactaattcgttgagggtttttatcacagaagaatgctgaattttaccaagtgctttttcttcatctattctaatgatgatatagtttttatccttcattctgttgatgtgatgtatcacattgattttgcgtatcttgaactatccttgaatttctgggataaatctcacttgatcatggtgtatggtccttttaaggtactgttgaatttggtttgctagtattttattgaggagttttgcatctattttcagtagggatattggcttgtagttttttgctcttacagtgtttgtctggctttggtatcagtgtaatgctgacctcataaaatgagtttaatgaggagtttggttgggctccttttccatttttttggaagagtttgagaaggattctttaaatgtttggtagaattcaacggtgaagccaccaagtcctgggcttttctttgatggaagatttttcctcactgatttaatctccttactcattattgatcttgtcaggttttctatttatgattcagtcttagcaggttatatatttctaggaatttattcatttcttctaggttatccaattttttggcatataatttttcattatggtctcatgatcctttatatttctgtggttatcagttgtaatgccttctctttcatttctagttttacttcagtcttgtctattttaatcttaagtagtctggctaaaggtttttgttggtttatcttttcatacaaccaacattcagtttcatcgatcttttctattgtcttcctagtctctcatttatttctgctgcgatctttattattatttccttccttgtactgactttgggcttagtttctttttccttctactgactttgggcttagctgctgctttttctagtaacttgaggtgtaacattaagctggtataagatctttcctactcacccttgctctctttggtttccatttacgtggaatgtcttttcccatctttttactttcgggctacatgcattcttaaagctatagtgagcttcttgtaggcagcatataccttaggtctttcttttttaatccagtcagccactatgtgttttgactagagaacttaatccatttacttttttgtttaaggagatagggtctctgtcacccaggctggagtgcagtggcatgatcatactcccactactctcagattcaagcaatcctcccaccctagcccaccaagtagctgggactactggcagatgccaccacacccaaataatttttttaaattgttttctgtagagatgcggtcttgctgtgttgcctaggctggtctcaaactcctgctctcaagtgatcctcctgcctcagcctcctgagtacatttatatttaaagtaattattgatgggtaagtacttactgttgcctttttgttcattcttctgtggctgttgtacagatgttttgttgctttcttcctcccttgtcttcctttgtgatttgatgactttctgtagtgatacgctttgatttctttctcttttctccataatataggttcttgctttgtggctactatgaagcttaaaacatcctgtagttttaatagtctgttttaagctgttaacagcttagctttgattgcatacaaacaatttatactcttccatttcccacattttatgtttttgatgtcacaatttacatctttctatattgtatattaacaaattattataactttttaatatttttatcttttaatcttttacactagagataagttatttagataccactgttacagtattagggtaatctggattgagtatataattacctttaccccagtgggttttataatttcatatggtttcatgttactaagtgtcctttcttttaagctgaagaatttactatttcctataaatcagctccattactgatgaagcccctcatcttttgtttgtccaaggaagtttttatctctccttcatttctgaaggccatttttggcaggtaaaacattcttggttggcagtacagtcatgcactgtgtaaagacattttggtcagtgatggtccacatatgtgacagtgctctcataacattttaatagtgctaaaaaattccaatcacctaatgacatagccagtgtaacattgtaaagcacattactcacatgtctgtcatttaaacctgctgcactgccagtcatgtaacagtagtaaatatggttatgtacagtagattatatacagtacataataatgaatagtaataagtgaccacattactggtttatatatttttatactatttattgttattttagaatgtattccttctacttactaaaaaagaaaagttaactcaaaaacaagcctcaagcagatgcttcagaagacattctagaagtcattgtcaccataggagatgtcagctccgtgcatgttattgcccctgaataccttaagtgggacacggtagaaggtgtcagacagtgatactcaagatcctaaccctatttaggcctagattaatgcgtatgtgtcttcgtttacaacaaaaaagtttaaaaagtaaaatcgggcaggcaaaaagggcctggaaggtaggctactgagttaagaagacagagtcctagctctgctataagatttgcagcactagattttgatacatatacagctaagtgtactaaatgttgttctggaatgtcacccttttattatgaaatgcaaatatgctcacctttatggtccttatgagttactccttattgttctaagtaatttcgggatattaactcagcccaaccctatgaaattggtcccattctaacaatgaggaacgtgagggtgtgatataagatattccaaactcatcttgaagatttcttagtctatactagactcagctatttctccagtgagtcctggtttctgtcacgggtaaatgatattcagagacagttttgcactttagaggctcattcctcctgagctgttagcagtcataagcctttttagtggttcaggctagaaaaaagtccaagaaaaaatgaaaaatgcatactatatttctaatttgaggatatactgtgttcttggataaggaggcaaattgtaactacactctatgtgtatgttgttaccctttagtaagaagaagcttcccagcctgctagtgttgaacatctagcaggcctagactctaatggcttctgtgttctcctctagctctgcctgcttaggactctgcccagccaggaaggaaacctacaggaggaagaatggctgcagggtggctgacaacctggtcacaggtacacaagaaatttctctatttccaaaagcacactgccattcctgaaaagaacacatctcttgcccctgacctgaagcttcacagcccaatctgagctggcttcatcttccgcagctcccaggctgcttcatgtggaagagggaatccctgggaaaggcttctgttcccacatttgttaactttctccagatattcttccatatttttgagtatgaattccatactgtagtgagtgctgtaaagaaagacttttactaggaaaattatttatcatttctcaagtatttcttgcattcctacagtatgccctgtctatactggatctgaataagacgaaaagagtcctcacaacctaactgtgcaaagatcaagccaaccatattttagaaaagctgttttgaccatgaccctgaatgagatggcccagggagtaggatttaaagagagttctgagaactcagctttaaggcaaattaagagaaggcctctgatgcatgtctgagcttccagtgccctgagtctcctctccagtcctgtcagcctcacccaccattctcctggtacattgtcaaaaatggtcattggctgagccagaatatgtatgtgatgttttagaactcagtaaccttccaggaagtggcagtggacttttcccaggaggagtgggcattgctggaccctgctcaaaaaaatctatacaaagatgtgatgctggagaactttaggaacctggcctcagtaggtaaggctggcctcatttcttcatttgtttatgtagcaaatagttcttaagcacatattatgttccagaatctgtggaaagaatagcaatacagtggttaaccccaaaatgaatggtccctgcccttgagggggcagtccagtggcttcccatgaaaatgcactgatttcattttctctatcactaatagcttaaggtaatttgcaatctgtgtctcatcttgtgtataggtttcaagggtcacttccatatagggcgtggaccatgctttttggttcttgtgaaagaaagagctcggctctgattgttttgttgttcctaaagctgcacttgactattttaataatcctttagttaaagccaaagtatggcaatcagttttgtggaatatttaattctcacacatttctcccacatccttgctttctgcgtgagcagggtatcagctctgcagacacagtctgatctccaaggtggatcaagaacagctgaagacagatgaaagaggaattttacaaggtgactgtgcaggtgagccttgggcagaacagggtgcagccttggccagtgagggttagtacatttgggaatgtcactcagtgaaggaaaagaaatctgaggccatgacatgagcttccttcctgtttcaccatctattcaatcgttcatacgttcatttggtctccgagaaagaagttttaattcctctttaaatgtaatgtctccatgaatgctttttgccagataatactgtcttatttcccaacctccacaatcctttctaactaaaatacctcccatttctactgcttgttcctatcactggtgaatcactggttgtgtcttctttcttacatttctctacttagaagatattatttgaaaacaaatccatagggtctccctccctttttctttgatcccaaccttttctcccaataattataaaaattcctgtgctatttcagactgggaaactcaacttaaaccaaaagatacaattgctatgcagaacattcctgggggaaaaacatccaatggcataaacacggtaagacttactaggaagtattcctggtctttgtagtagaagtctgggaatctgaatgagttaaaacatcagcacccaaagcaggggtaagaattcaggcaccaggctttcaccagaaagctgtctcgggagagtttggagtttgattttcatgaaattggagaaatctgtaaacctaggttaacacttgctggctcacagagaataaccacaagtaaacatctatgtaaatatgattttagagttaagtatttagtacataattcattcattcttcactcagtattagaaaaactgtattaaagaagccctttgctgggaaggaatagagccttggacagaggagtgagcttattcaactcgaaaaagctaatagggcaaaagtcatacgcacctactgaaaatggtacacatgtcagtcatgatcatgtgcttcctatatatggcagaatcctcatggaagagaattcctgtgaataaggtgaaagtgaaaaagcctctagtcaccacttactcccttttcaacaggcagaaaatcaacctggtgagcactccctggagtgtaaccattgtgggaaattcagaaagaacactcgctttatttgtacaagatattgcaagggagagaaatgctataaatatataaagtatagcaaagtcttcaaccatccctcaactcttaggagtcatgtgagcattcacattggagagaaaactcttgaatttactgattgtagaaaagctttcaatcaagagtcatccctcaggaaacacttaagaactcccacaggacagaagtttcaggagtatgagcaatgtgatatgtccttcagcctacactcttcctgctcagtacgtgagcaaatacctactggagagaaaggtgatgaatgcagtgactatggcaaaatatctccccttagtgtccacacaaaaactggtagtgtggaggagggtttggaatgtaatgaacatgagaaaactttcactgaccctttgtcccttcagaactgtgtcagaactcactctggagagatgccctatgaatgcagtgactgtgggaaagccttcatttttcagtcttcccttaagaaacacatgagatctcatactggagagaagccttatgagtgtgatcactgtggaaaatcctttagccagagctctcatctgaatgtgcacaaaagaactcacactggagagaaaccctatgactgtaaggaatgtgggaaggctttcactgttccttcatcccttcagaaacatgtgagaacccacactggagagaaaccctatgaatgcagtgactgtggaaaagccttcatcgatcagtcatcccttaagaaacacacacgctctcacactggagagaagccttatgagtgtaaccagtgtggaaagtccttcagcacaggctcttaccttattgtgcacaagagaactcacactggtgagaaaacctatgagtgtaaagaatgtgggaaggcctttaggaattcctcttgcctgagggtacacgtgagaactcacactggagagaagccttataaatgtattcagtgtgaaaaagcctttagcacaagcactaaccttataatgcacaagcgaatccacaatggccagaaactccatgaatgaaatgactcagggaagtgtttgttgcccctcatgcctcctttctcactttagaacatatattggagagaagccctgttatggtcacctggaaacagccttctggcccaactctggatgcctgttatactgggacaaaccttataaatgttatagctatgattgtttttatcagtgagtatttcattcttatatgtgtcacaactgtagatcctatgaatattttagttatcttttcagtttaattgcattgtgaacagaacacatggtcttcaatatgtagattctgtgtgacatagatttgaacataattgctggacactgactgatgtactgtggcagacagaactagttgctgtctcaatatccattcctcccttctttcttaaagtaataaaatttaccatttagttcaagctggcaatgtggacagttttcacccagcttcccttacagctgtgagcggccaaatatgttcacatccctagcccatgcaaagtaggcagaagtcactggatacagctgctaaggaagctcatggaaatgggaatatctcatctggtgtttttttcttaactatttgccctttgtcttgtcccttatttcctagaaaatatatacaccaagaggaggacagagaaaggatactaaatgaaacaacaggggagatacaatattatctggttgcactaatcctgtgctgcttatctctggatttcatgttacatgagaaaaattaactgccatgtggtttaaaccactcttgtgggaagttcctctttcagctgatttcagtcccaactgttacatctaataaatggtcaagttttaggaatcgttcaagtatggttgaaaaattgtgttttctgaggcagaaggatcacttaagtctaggagcttgaaatcagctgaggcaacacagtgagaccccatctctaccaaaaaaggaataattaggtcttgctgtgttgcccaggctggagtgcagtggtgtgatctcagctcagtgcaacctccgccttctgagttcaagtgattctcgtgtctcatcctcccaagtagctgggattacaggcaaatgccaccacgcctagctacttttttgtatttttagtagaggtggggtttcgccatgttggccaggctggttttgaactcctgatctcaagtgatctgcctgtgttggcctcccagagtgctaggattacaagtgtgagtcaccgcccccagccaaattgttttctttaaaaatctctctctctaggccaggtgcagtggtgcatgtctgggagcccaaggcgggcagatcacttgagcttaccagttcaagaccaagcccagccaatgagccgaaactccatctctacaaaaaacaaaacaaaaaaaagttagccaggtatggtattgtgtacctgtaagtcccagctactcagtaggctgaggtgagaggatcacctgagcccaggaggcagaggtagcagtgagccgaggtcatgccactgcattcctgcccgggccacagcaagaccgtgtctcagggaaaaaaaaaaaaaaaaaactctccttttttggggggcactgtaattgggtacatttaagtttactcattttatgtttctggcaaattgtgctattagtgcccatacttttcccctaataactaatgttcattaatttactacaaatgtgagctactgacctagaaataccattttctcaacctgtaaggacaaccaggagcaacttactttttctcagcgttacatcagttatactgttgcttgcaataacatccagcaggtatggtcatctttacatcccacaacttgtcctctctattgatgcctttatgagttctttcgtaagacagacgtgaatgtttgttggggaatacacccaaacattcaggctaaccacctgaagtttctaggggttcagttgtctggcgcttgtcaagatattccctctaaggtgaaaggagaattgctgcaatttgtactactaatcacaaacagcacaatgcttggtcggtttttttggtttctggaggcaccatattgacgcaatatgacaacacttggagaatttagaaaaataacacgttctcggccagacgcggtggctcacgcctgtaattccagcactttgggaggccaaggcgggcggatcacctgaggttgggagttcgagaccagcctggccaacatggagaaaccccatctctaccaaaaatacaaaattagctgggcatggtggtacatgcctgtaaccccacctacttgggaggctgaggcaggagaatcgcttgaacccgggaggcagaggttgcagtgagccgagattggaccgttgcactccagcctgggcaacaagagcgaaactccatttcaaaaaaacaaaaaacaaaaacattctggcagtatatgagggcaggataacaaactcagacaaggacagaatgaagcctgaaaaccttcaaaaataatttatgaaatagaaggaaactgggttttttttttttttcgtttttttttttgagatgcagtctcgctctgttgccaggctggagtgcagtggcgcaatctcagctcattgcaaaccttcgcctcctgggttcaagtgattctcctgcctcagcctccggagtagctgggactacaggcaagggccaccacacccagctagttagagatggggtttcaccatgttgtccaggatggtctggatctcttgacctcgtgatctgcccacctcagcctcccagagtgctgggattacaggtgtgagccaccatgcctggccggaactgggtattttttaaaaagaaaccatcatatcgcatttaaatttatccagaaatgcaaagttggttttacattagaaaaatcaataaatacaattcacttttaaaataggcttattactcattcactcatactaataattactaggcacctagaatgaatgaggcagtgttcaaagcatttaatgcattattgaaaaaataggataatctcagtagataaagaaaaagccataaagaggtattactgagaaaaatctttgaaaatatgataaacattgtataaaaaaatgcaaaagtaaacaataaatgaatggtggaaaatagaaaatgagtttaaaatcaggaagatgacaatggtatccactacttagtattttactggaatcttaagtgaggcaggctaggaaaagatatttaaaaacctaaggaccagaaaggtagaagtaaatctgtcattatttataatatgattacctaaatggaaaatttcaaaggatctatatttaaattaatgaaaatgtttactatcttaataaagataaacttgcaacttatactcaggaatagaaataataaaatttaaaagtcaataccatttataagagcaacaatggtataacatatggaagaataaattttaaacttaccaaaattgtggaagaataaattttaaacttaccaaattgttttgaagacagtattgaaaacattaaagatgacgtaaacaaatttgagacattcattgaaaggtcaaattctgaaaagactcacttctcccaaactgatttagattcaaaaagttccaaatacagctccacttccagattggctgcagacatttacaggaacccacatgaataaacagtgaactaacatcttcaaagaccctggaaatctgtggacaaaaaaaggagtgaaagaattaaatgccagaggatgagctcctcctagaagagcagaaatcagtggctggtttcttccctgaaggcattttcctggtctaggagcagattggcggagagccaggcctgccacaggcagaggaactttactggaatatggagagaccagggggcattaatggtcacaaggctagtgtgacactataatataaaatagactctctttaccagtgctgcgtatccctataatgatttgctgagtgtgtagcaacagctggtgctgggcactaaccaggaaaaaatggatatccctattgtagtgcttagattccacagtcctgttagagggagtggtctgaaatagtcataggaaagatcttactcaagatgtttgaaacccgaagtgaaccaaaactaatttttacatcccaacctctgattggatcaaagttgaggagattctcacctaaactgcttggcagaggaaatggagtgacttccagatgaaaatatttttcaatttctgctgttcttttaagcataatatccacatccaacttaaaacatcacatgatgtgcagagcagcaggtcaatgttaccaatcatcaggagaaaaaggtccaacaaaaatagacccatagatgatatgagaagttggaattagcagacaaggactttagaattgttatagaaccaacaggttcatatgtctgctgtgtagtagcagaccaattacacagacacggattaagcagagagtttaattaccacagggcgccaagtaaggagataggaggagacatctatatccccaagaagttccaggctggagttttaaaggggatcagggagggtgaaggactggagaattagggttgttgatggtcagagcaagcaggataaagtcatcaggatgtggaaactagattctttggtaagtcagctcgtggtgcccctcagaccagctgagtcaatggggtccttcagaccacctgaaatggtaggtatatcagcatgtaaaaagtgtgaaagagtatctcaaaggaaaaacttaatgttttataatggtcaagttatcaatagagtagttaatcttgtaacagggtgatatggtttgcctgtgttcctacccaaatctcaccttgaattgtaagaatccccacctgtcatgggaaggacccagtgggaggtaactgaatcacgggggtgggtttttctgtgctgttctcatggtagtgaataagtctcacgaacgtatgattttataaaagggcagttcccctgcacacgctgtcttgcttgtcaccatgtaagatatccctttgctcttcgtcttgggccatgattgtgaggcctctccagccatgagggtctgtgagttcattaaacctctttcctttattagttacctagtctcaggtagtatgtccttattagcagcatgagaacagactaatacacagggtctacatgattctaggacaataggcaccagtgaactatgaagaagtaggtcagagattaaacttcattaatgttgaatgtgctataagcttggtttttcatttatccctctctcttctttcctgattaattttataaagtttataggggcagtttcagaattgcccctataacttatgacagatacgttaaaacaaaaaatttcaaatggatgaaaatatatatagaattgcaggccaggcgtggtggctcatacctgtaatcccagcactttgggaggccaaggtgggtggatcacgaagtcaggagttcgagaccagcctggacaacatggtgaaaccccatctctactaaaagaaagatcagccaggtgtggtggcacatgcctgtaatcccagctactcgggaggctgaggtaggagaatcacttcaacttgggaagcagaggttgcagtgagccaagattgcgccattgcactccagggttgggtggcagagcaagactgtttcaaaaaaaaaaaaaaaagaaagtacataaaattgcagtatctaagtggaatctctaaagtagaaacagacaatctagaggtaaaaattataatttctgaaattaaaaaaaaattctgtaagtgggcctaaaagcaaactaaacacagcaaataaaggtgggggagagggcaatcagtgaactcaaagataggttaacagaaatgtgcctaacttacggacacgggaaaacaatgagtgttttctaaaactgattaaaaacatcaaaccagcagagtcaagctcagcaaacctaagcaggataaatgcaaagaaaaccacacacagttcaccatcaatctgttaaaaaaaaaaaaatcttaagaaagagaaagtacgttcaggattttaaaaaatgtggctgacttctcagtgacataacagggagaagaaaaatgtaattgtatctttaaagtgctgaaagagaaaaacctaattgtatgctttgcaaaaaaaatcttcaaaaatacaaaattccattttgagacaaaagctgacaaaataaattgtcaaacttgtgctatgggaaatactacaggaagtgtttcatactgaagagaaataatcccaggctgaggtgcatgcagattgatgggatgaaattaaagagtatggaagggcaaacaggtggacaaatataaaatactatttttttaatttaaagactattgattgattaaagcaacaataacttagtgtgaactctgtaataagttccagggtctgtatgtctgcttttacaccagtaccatgctgttttgcttactgcagccttgtagtatagtttgaagtcagatagagtgatgcctccagctttgttcttttttattacccccagacagggtttcattctgccacccaggctggagtgcagtggcacgattgtggctcccttcagcttcaacctcccaggttcaagcaatcctcccgcctcagcctgccgaatagctgggactacagacacatgccaccacacatggcaaagttttgtattttttgtaaagatggggtctcactgagttgcacaggctggtctcaaactcctggactgaagtgatctcacctagggctccagtgatcctgtcttgggcttccaaagcactgagattattaagtgtgaggcactgcacctggatctcctcatctttttctaaagccacaagtcctgcagggtacaggagctcatgcctgtaataccagcactttgggaggccaaagtaggaatactccttgaggcctcaaaggtttgagagcagtttgggaaacaaagcaagactgtctctacaaaaaaatgtttttaaaaataagctgggcgtggtggtgtgcacttgtagtcctagctacttcggaggctgaggtgagaggactgcttgaggccaggaggttgaggctacagtgagccatgattgtgccactgcactccagcctgggtgaccaagcacaagaccctgactcttttataacaaaacaaaacaaaaaaagccaccagtcccactcacataacctattaatctattaacccattaatccctcaatctattaatgaattaatccattcaagagggcagagccctcaagaccagtcgtctcttaaaggccccacttctgaatactgccacatgggagattaaatttcaacatgagtttttggaggggacaaatattcaaactatagcattccgccccggccctcaaaaactcttgctcctctcacatatgagtacattcattccttctctatagcctaaatgtctcaagttattccatcaccaactcaaaagttcaaagtccagagtatcatctgtgagcctgtgaaatcaaaacaagttacctactctcgagagacagtagtggtacaggcataagacagacattcacattccaaaaggggagaatgaggaaaaagaagtaacaggccccaatcaagtctgaagcccagcagggcagaccataaatctgcaagctggagaatcatctcttttgactccacgtgctgcctcctggaaaaactgaggtcacagtttgaccccccaaggcctcaggcagcccagcccctctggttttgctgggtgcatcccaaatagtggcttatacagtttgaggacttgtgcctgaagacttcctaggtgggcgttgcatgctgctggttactctgcagttttggggtcctgatggcattcttactcccatagctccactaggtattgccctggtggggattctgtagcagccccaacgtcacatttctgcatgtgaccatggctctggtcgggactctctgcagttgctctatccttacaacacgtctatgcttgggcctccaggcttttgatgacatcctttggaatctgggtggaagctgccaaacctccattctgcaagtctgcagaattagctgcacatggatgccaccaaagtttatgacctgtaccttctgaagggcatgagctgcacctgggtcacttaagctatagctgggcagccacagagcactgtgcagaggtgcagggagcagagttccaaggcaactcagcagcaaactatggagaatgactggtctgtcccctgaagccactgtgccctcgtaggcctctaggcctgtaatgtgaggggcaaccttgaaaatctccagaatgccttcagggtctttcttccattgttttgagtaaaagcacccggctcccttctgtgctaatctcttcagcaaaggatcactagggtacgaccttagtttccccacctgaacacactttttcactctatgtggccaggctaagagtttcccagatttttccatggtgcttcccttttaacataaattctgtcttttaagttgttcttttgcttctgaatcttggcacaaatagccaaaagtaaccatgcaactcctatgtgttgcttagaaatttctactgccacataccctagttcatcactctcaaattaggccttccacaaagccctcaggcatggatcgagttcagccaagttttttgccagtttataacaaggacagcctttactgcagtttccaatgccttctttctcaattccagctgaaaccacatcagaatggcctttactgtccatatttctatcaaaattctagacacagccacttaacaaatctctaaggcgttccaaatctttacctagctttgttttctaagccttcatcagaatctaggctttttctagtctgctcctccaaattattctaccttctgccccattatacccagtttcaaagctgcttccacatgttcaggtatttctcgttgtcagtaacaccctacttcttggtaccaattttccagaattccatgaactctaccaccagttaacccaatggtaactggaacatattccagctaagaaattcagcagtttattaaaaattaatggatctaggccaggcatggtggctcacacctgtaatcccaacacattgggaggctgagatgaggggatcacttcaacccaggagtttgagaccagcctgggcaacaaagcaaagccttatctctacaaaaaatgaaaagatttgctgggcatggtggtacatgccctgtggccccagctactcaggaggctgaggttaaagtattgcttgaacccagaagtcaaggctgcagtgaggtatgatggtgtccctccactacagcctgggtaacagaatgaaaccatgtctcaaaaaaaaacctcagccaggcgcagtggcttatgcctgtaatcccagcactttgggaggccaaggcaggtggatcacctgaggccaggaattcaagaccagcctagccaacatggcaaaacaccgtctctactaaaaaaaaaaaaaaaaaatacaaaaattagccgggcacagtggcacacacctgtaaccccagctactcaggaggctgaggcaggagaaccacttgaacccaggaggtggaggttacggtgagccaagatcgtgccactgcactccagcctgggtgacagatcaagactctgcctcaaaaaaaaaaaaaaaaaaaaaaattgggtctagacactgagcaccaatgactactaacactcacaaaagagacaccattggacattatgtaccttctgatcaaagatcacatgtgccaccacctccccaaaaatgaaactgaatcttatctctagatccaactatgatataaaaagaaatacgctgacaaccctatgagaatgcaattagcaaaatccacactacacataactctagatcttaatccaggtgcttcaaaaaataaaacggggaagactaaaaaatgacatccaaaaatgagcaaaaattaaataatgtttggggttccacatttgggtgaaaggtaataaatgattactataaaagtcatgagagtggttactctgagggaagaaagaggcagttgtgactgggacatggtatttgaggcaaagttctacatcttgaacggggtcgtggttacaagagtatttgttatttaattcatgaaccacacatttaggtcatgtgaaaaaataaacctaaacctgatctccccttaccaaaaaatactaggaaatacaagaggaaatcttcccccaactacccttatgaggctggcataaccatgctatgtaccagataatatggcagaaaaagaaaaccacaaagctatctcacaaacagattggtcaggtacagtgcctcacacccataatcccagcactttgggaggccgaggcaggaggatgactggagcccaggggttcaagactggcctaggcaacatagggagaccctgtctctacaaaaatttaaacattggccagcatggtggtgtgtgcctgtagtcccagttattcgagaggctgaggtgggaggatggcttgagcccaggagttcaaggctatactgagcctgatcatgccgctgcactccagcctgaatgagagtaagactctcttaaaaaaaaaaaaaagtgtatgaaaagtcaggaactatagtttctataaatatatgttaattactttttctggcagggcgcagtggctcacgtctgtaatcccaacattttgggaggctgaggcaggcggatcacttgaggtcaagagttcgaggcctgcctggccaacatgatgaaatcccgtctctactaaaaatacaaaaattagctgggcatggtggtatgcacctgtagtcccagctactcaggatgctgaggcatgagaatcgcttgaacccaggaggcggaggttgaagtgagccaagttgcactactgcactccagtctgggaaacagactctgtctaaaaagtaaatatatatatacatacacacacgcatacattttcaaagtatatgttcaatttggttttttttcaaccatgacctatctttataggtgaagcacctccaaattagcatcagggggtccaactgttaatctaaaaaaagtataatgaatacactactaccctgaagtttcagactttttggccattatacattatgttaacaattagatccattgctttaaatttagttatttcatctgaaaagttttccggaggccaggcatgctggctcacacctgcagtcccagcactttaaaaggccaaggcaagaggattgcttgagcccaggagttcgagaccagcctcagtaacgtagtaatactccatttgtatataaaaaaaaacttttttaagaagaaaagttttctggagattgaaatgtatccaatttaatatcctctttgctctcaggtattttaccagtgtttctacaatgaatgtggaaaggtttcacaacaaaaccaatctttggcctttcctccttccccctttctcttccttttcagcagagtgtccttttggaaggtacccctgaggtgtgggggactgcaggggccagcatgtccacagccaagcttttgggtaacacagatgcaaatgagggtttaaaagccaatgaggataatggaagctagccttctcactgagaaaagagttacaaacaggaaaggggaaggtgagaataatacctgtcctgattaattgaaaatattagtgtaaagtcctgttaacatataatataggactcaaatgtgtatacttatatccacaaatgtgtttaggtagaaaaacacttattctctactcctgtttgctgagaggccctgaaagcaatgaatccaaggtagcaatgataatacttagtgcccagaattggtttctaaataccattatcctcttaaaggaactagagctctttggagaaaaggctgactccagggctggagaaggaaaaatatgagatgagcctagaacatcttaagactggaaagttctcatggaatgacgggtcatgtcaaggggatacaggaggcagccaaggggccttccactggccaaagctgggacaactagagcaaaataagtaatgagtatatgggaacccatgaattcacactgctacaaataaatgaagaaagaaatagggaggaaaaaaatctctaacctagagcagtacgacaaacgggaaatctggaaggcacagacagttggaaagaaaaaaaaattgccgggtgtggtggctcacgtctgtaatcctaacacttcaggaggctgaggtgggcaggtcacctgaggtcgggagttggagaccagcctgaccaacatggagaaaccccatctctactaaaaaaattaaaaattagccaggcataatggctcatgcctgtaatcccagctgaggcagaagaatcgcttgaacccaggagccggggaggttgcagtgagccgagatcatgccattgcactccagcctgggcaacaagagcgaaactctgtctcaaaaaaaaaaaaaaaaaaaaaaattggcaactattataataataattaatccagacaagaatcattactggtggatgagtttctaagaggaaaaagatatttacatagtcttaacacattgccccctaaaagcatttaagtataacctacttttaattaatgcagttttgcaacttttcagtctaaagaaaaacaaaaaattaaattaaaaaaattaatgcacagtggagaaacttgccagacactatcttaaccaagagataacagcttacaccactattagaaataatggggagtggccaggcgctgtggctcacacctgtactcctagcactttgggaggctgaggagggaggattacttgaggtcaggagttcgagaccagcctggccaacatggtgaaaccctgtctctacaaaaatacaaaaattagccgggtgtggtggtgtgtgcctgtaatcccagctgctcaggaggctgaggcaagagaatcgcttgaacccaggaagcggaggttgcagtgagccgagatcacgcaccactgcactccagcctgggtgacagagcaagactctgtctaaaaacaaaaagaaaagaaataatggggagtctttggtggtttgtgttgtgggtctttatgatcagtgatgaggtctattcatctctactgtgagaccacaggggtcagtggggttagtgagtgatatggtttggctgtgtccccacccaaatctcaccttgaatggtaataatccccacatgtcaagggtggggccaggtggagataactgaattacaggcagtttcccccatactgttcttgcggtagtgagtaagtcaagatatgatggacttataaagggaagtccccctccacaagatctcttgcctactgccaggacattgctcctcagtcgccttctgccatgattgtaaggcctcctcagccatgtggaactgtgagtcaattaaacctctttcctttgtatattacccagtctcaggtatgtctttattagcagcatgaaaacacatcaatacagtgaggatttgtgaggttagtgatgaaggtctgtagggacagtgattaggagtctctggggtcagtaacatgtacactgtggggttagtgatagagattccttaggagcagtaatagggattatacagagatcaatggaggaatctctggtgctatgttgcagctctgtggggtcggtgatatatatgaagcggggtcagggatgtgcagtctgaaatcaatggtgtggctatgtgggggtcagcgatgtgatcccaagggggcttggtggagattcagatggtcagtcatactggggaactgtggagtcattgatggaaggtccgtgggattgctcattgggaatttagaggtaagtactgtggcgcccatagaatatttaccagggatggaaagtgcattagttaaggtcagtgatgggggttgaggattggtgatggggtgtaggtgtgtaatatgccagtggtcaataggttagatgacgagggctataaggaatgctattcattgtctataagaaacccactttaattaaacagacacatatagattaaaagatgaatgaagaaagatataccatgctaatgacaatcaaaagaaagcaggagtagctatattaatttcagacagagcagacttcaacttttttaaattacagatgtggggtcttgctacattgcccaggctggtgtcaaactcctagcctcaagcgatcctccacctcagcatcccaaagttctgcattacagatgtgagaccctgtgcctggaccagagcacacgtcatatcaaggaaagttatctgggataaagaggggcataacttaaagagaccaatattccaagaagtcataacaatccttaatgtgtgtacacatgacagagcatcaaaatgaggtaaaagctagtagaactgcatggagaaatagataaaaccactattatagctggagatttaaatacccctttatcgccaggcacagtggcacactttgggaggccgaggcggttagatcacgaggtcaggagtttgacaccagcctggtcaatatggtgaaacctcgtctctactaaatatgtaaaaattagccaagtgtggtggtgcacacctatagtcccagctacttgggaggccgaggcaggagaatcgcttgaacccaggaggcaaagggtgcagtgaactgagatcacgccatggcactccagcccaggtgacagtgcaagactccatctcaaaaaaaaaaaaaaaaatgaaaaaataaattaattaaaaataaatacccctctatcacaaatggacagatccagcagggagaaaatcagtaagaatgtagtaaaactcaacagcattatcaatcaactggatataattaacatatatagattacttcatccaaaaccagcagattatacattcttctcaagctcacatagaatattcatcaagacaggccacactgcgggtcatgaaacacctcttaacaaatatgaaagaactgaaatcatacaatgtatgctctcagatcacaacagaattaaactggaaactaatcaaagacagctaaaaaaatctcaaaatacttgaagatcaaacagcacacttctaaataaataggtcaaacaagaaatctcaaaaaaagtttaaaaaatttgcactgacaacagatacaacttaacaagatttgtggggtgcaacaaaagcagttcttcgggggaaatttataacactgaatggttagaaaagaaaaaagatctgtgccaatcatctaagcttccaccttaggaaactaaaaaaaaaaaaaaaaagcaaattaaatccaaagtaagcagaagaaaagaaataataaaaattcaaggccagacatggtggcttatgcctgtaatctcagcacttttggaggccagtgtgggaggatcacttgagggccaggagttttgagaccagcctgggcaacacagctagactccatttctacaaaaattttaaaagccaggcatggtggcacatgcctgtactcccctctatttgggtgactgaggtggaagcatcccttgagtccaggagtttgaggctgcagtgagccatgatcatgccactgcactcctgcctggacaacaaagcaagacactgtctcaaacaaaaaacctcaagcaaaagtcagtgaaattgaaaacagaaaatagagtaaaatcaacaataccaaaagctggttctttgaaaggatgaataaaataaacctctcatcaggctaacaaagaaacaacagagaagacacaaattactaatagcagaaattaagaagggacatcactacagatctcataaatatgaaatggggggcggagccaagatgtccaaataggaacagctccagtctacagctcccagcatgagtgatgcagaagacgggtgatttctgcatttccaacttaggtaccgggttcatctcactggggagtgtcagaaagtgggtgcagcgcaccgagcgtgagctgaagcagggcgaggcatcacctcacctgggaagcgcaaggggtcagggaattccctttcctagtcaaagaaaggggtgagagacagcacctggaaaatcgggtcactcccaccctaatactgcacttttcaaatggtcttagcaaacggcacaccaggagattacatcccacgcctggctcggagggtcctacgcccatagagccttgctcattgctagcacaacagtctgagatcaaacggcaaagtggcagtgaggctgggggaggggcgcccgccattgctgaggcttgagcaggtaaacaaagtggctggaaagcttgaactgggtggagcccaccgcagctcaaggatgcatgcctgcctctgtagactccacctctgcgggcagggcacagccaaacaaaaggcagcagaatcctctgcagacttaaatgtccctgtctgcagctttgaagagagcagtggttctctcagcatgcagctggagatctgagaatgaacagactgcctcctcaagtgggtccctgacccctgagtagcctaactgggaggcatcccccagtagggggagactgacacctcacatggctgggtactcctctgagacaaaacttccagaggaacatttgctgttcaccaatatccactgttctgcagcctttgctgctgatacccaggcaaacaggtttggagtggacctccagcaaactccaacagacctgcagctgagggtcctgactgttagaaggaaaactaacaaacaggacatccacaccaaaaccctatcagtacatcaccatcatcaaagaccaaaggtagataaaaccacaaagatggggaaaaaacagagcagaaaaactggaaactctaaaaatcagagcgcctctgctcctccaaaggaacgcagctccgcatcagcaatggaacaaagctggacggaaaatgactttgacgagttgacagaagaaggcttcagatgatcaaactactccaagctaaaggaggaagtttgaacccatggcaaagaagttaaaaaccgtgaaaaaaaattagaatggctaactagaatagccaatgcagagaagtccttaaaggacctgatggagctgaaaaccaaggcacaacaactacatgacaaatgcacaagcctcagtagccgattcgatcaactggaagaaagggtatcagtgatggaagatcaaatgaatgaaatgaaacaagaagagaagtttagagaaaaaagaatgaaaagaaacaaagcctccaagaaatataggactatatgaaaagaccaaatctacatctgattggtgtacctgaaagtgacagggagaatggaaccaagttggaaaacactctgcaggatattatccaggagaacttccccaatctagcaaggcaggccaacattcaaattcaggaaatacagagaaagccacaaagatactcctcaagaagagcaactccaagacacataattgtcagattcaccaaagttgaaatgaaggaaaaaatgttaagggcacccagagagaaaggtcgggctacccacaaagggaagcccatcagactaacagctgatctctcagcagaaactctacaagccagaagacagtgggggccaatattcaacactcttaaagaaaagaattttcaaccagaatttcatatccagccaaactaagcttcataagtgaaggagaaataaaatacagacaagcaaatgctgagagattttgtcaccacctggcctgccctacaagagctcctgaaggaaggactaaacatggaaaggaacaaccggtaccagccactgcaaaaacatgccaaattgtaaagaccatcaagactaggaagaaactgcatcaactaatgagcaaaataaccaactaacataatgacaggatcaaattcacacataacaatattaaccttaaatgtaaatgggctaaatgctccaattaaaagacacagactggcaaattggataaagagtcaagacccatcagtgtgctgtattcaggaaacccatctcacgtgcagagtcacacatagactcaaaataaagggatggaggaagatctgccaagcaaatggaaaacaaaaaaaggcaggggttgcaatcctagtctctgataaaacagactttaaaccaacaaagatcaaaagagacaaagaaggccattacataatggtaaagggatcaattcaacaagaagagctaactatcctaaatatatatgcacccaatacaggagcacccagattcataaagcaagtccttggacacctagaaagagacttagactcccacacaataataatgggagactttaacaccccactgtcaacattagacagatcaacaagacagaaagttaacaaggatatccaggagttgaactcagctctgtaccaagtggacctaatagacatctacagaactcttcaccccaaatcaacagaatatacattcttctcagcaccacaccacacttattccaaaattgaccacatagttggaagtaaggcactcctcagcaaatgtaaaagaacagaaattataacaaactgtctctcagaccacagtgcaatcaaactagaactcacgattaagaaactcactcaaaaccgctcaactacatggaaactgaacaacctgctcctgaatgactactgggtacataacgaaatgaaggcagaaataaaaatgttttttgaaaccaatgagaacaaagacacaacataccagaatctgggacacattcaaagcagtgtatagagggaaatttatagcactaaatgaccacaagagaaagcaggaaagatctaaaattgacaccctaacatcacaattaaaacaaatagaaaagcaagagcaaacacattcaaaagctagcagaaggcaagaaataactaagatcagagcagaactgaaggaaatagagacacaaaaaacccttcaaaaaatcaatgaatacaggagctggttttttgaaaagatcaacaaaattgatagaccactagcaagactaataaagaagaaaagagagaagaatcaaatagatgcaataaaaaatgataaaggggatatcaccactgataccacagaaatacaaacaaccatcagagaataaacacctctacgcaaataaactagaaaacctagaagaaatggataaattccttgacacatacaccctcccaagactaaaccaggaagaagttgaatccctgaatagaccaataacacgctctgaaattgaggcaataactaatagcttaccaaccaaaaaagtccaggaccagatggattcacagccgaattctaccagaggtacaaggaggagctggtaccattccttctgaaactattccaatcaatagaaaaagagggaatcctccctaactcattttataaggccagcatcatcctgataccaaagcctggcagagacacaataaaaaaaagagaattttggaccaatatccctgatgaacatcaatgcaaaaatcctcaataaaatactggcaaaccgaatccagcagcacatcaaaaagcttatccaccatgatcaagtgggcttcatccctgggatgcaaggctggttcaacatacgcaaatcaataaacgtaatccagcatataaacagaaccaacgacaaaaaccatatgattatctcaatagatgcagaaaaggcctttgacaaaattcaacaacccttcatgctaaaaactctcaataaattaggtattgatgagagtatctcaaaataataagagctatctatgacaaacccacagccaatatcatactgaatgggcaaaaactggaagcattccctttgaaaactggcacaaaacagggatgccctctctcaccactcctattcaatatagtgttggaagttctggccagggcaatcaggcaggagaaggaaataaagggtattcagttagtaaaagaggaagtcaaattgtccctgtttgcagatgacatgattgtttatctagaaaaccccatcgtctcagcccaaaatctccttaagctgataggcaacttcagcaaagtctcaggatacaaaatcatgtgcaaaaatcacaagcattcttatacaccaataacagacaaacagagagccaaatcatgagtgaactcccattaacaattgcttcaaagacaataaaatacctaagaatccaacttacaagggacatgaaggacctcttcaaggagaactacaaaccactgctcaatgaaataaaagaggatacaaccaaatggaagaacattccatgctcatgggtaggaagaatcaatatcgggaaaatggccatactgcccaaggtaatttatagactcaatgccatccccatcaagctaccaatgactttcttcacagaattggaaaaaactactttaaagttcatatggaaccaaaaaagagcccacattgccaagtcaatcctaagccaaaagaacaaagctggaggcatcatgctacctgacttcaaactatactacaaggctacagtaaccaaaacagcatggtactggtaccaaaacacagatatagaccaatggaacagaacagagccctcagaaattatgccacatatctacaaccatttgatctttgacaaacctgacaaaaacaagcaatggggaaaggattccctatttaataaatggtgctgggaaaactggctagccatatgtagaaagctgaaactggatctcttaaagacttaaatcttagacctaaaaccataaaaaccctagaagaaaacctaggcattaccattcaggacataggcatgggcaaggacttcatgtctaaaacaccaaaagcaatggcaacaaaagccaaaattgacaaatgggatctaattaaactaaagagcttctgcacagccaaagaaactaccatcagagtgaacaggcaacctacagaatgggagaaaatgtttgcaacctactcatctgacaaagggctaatatccagaatctacaatgaactcaaacaaatttacaagaaaaaaaccaccccatcaaaaagtgagcgaaggacatgaatagacacttctcaaaagaagacatttatgcagccaaaagacacatgaaaaaatgctcatcatcattggccatcagagaaatgcaaatcaaaaccacagtgagataccatctcacaccagttagaatggcaatcattaaaaagtcaggaaacaacaggtgctggagaggatgtggagaaataggaacgcttttacactgttggtggaactgtaaactagttcaaccattgtggaagtcagtgtggtgattcctcagggatctagaacaagaaataccatttgacccagcaatcccattactgggtatatacccagaggattataaatcatgctgctataaagacacatgcacatgtacgtttattgcagcactattcacaatagcaaagacttggaaccaacccaaacgtccatcaatgatagactggattaagaaaatatggcacatatataccatggaatactatgcagccataaaaaatgatgagttcatgtcctttgttgggacatggatgaagctggaaaccatcattctcagcaaactatcccaaggacaaaaaaccaaacaccacatgttctcactcataggtgggaattgaacagtgataacacatggacacaggaaggggaacatcacacaccggggcctgttgtggggtggggtgagggggaggaatagcattaggagatatacctaatgttaaatgacgagttaatgggtgcagcataccaacatggcacatgtatacatatgtaactaacatgcacgttgtgcacatctaccctaaaacttaaagtataataaaaaataaaaataacaaatacgaaatggataataaagcaatttcatgaacaattctacatccacaaatttgaaagcctagatgaaatacatcagtgatgtgaaagaaacaatatgcctgtattagtctgttttcatgctgcttataaagacatacccgaaagtgggcaattcacaaaagaaaaaggtttaattggactcacagttccacgtggctggggcggcctcacaatcatggtggaagccagggaggagcaagtcacatcttacgtggatgttggcaggcaaagagagagcttgtgcagaaaaattcccgtttttaagacagtcaaaactagtgagacttattgactatcacaataacaggatggggaagacttgccccatgattcaattacctcccaccgggtgcctcccacaacatgtgggaattcaagatgagatttgggtggggacacagccaaaccatatcactgccaaaactcacacaagaagaaacagacaatctaaatagatctgtatctataaagaaaaagaataataacattccaaaacaaaaagcaccaagtccagatgtgttcactagtgaattctaccaaacatttaaggaagaaagtaagaaagtatgccagttttctacaatctcttccagaaaaagcagagggaatactttctaacattctgtgaggccagcatcaccctaataccaaaacgaaagacattaaaacaacagagaactacaggccaacaccatggctcacaaatacagatgcaaaaagtttcaacaaggtcgagcatggtggttcatgtctgtactcccagcactttgagaagccaaggtgggtgggtcacttgagtccaggagttcgagaccagcctgagcaacatggcaaaaccccatctctttaaaaaaaaaaaaccaaacaaacaacaacaacaacaaaaaccaatcctgtattagtgagggttttccagagaaataggattaataggatttatataggtatataccacaccttttttctccacttcttttccccacaacacaacaagcggatgacaatatttgtgagtcataacaagttaaatgaaacaacatggttaacttaacaaacttctctataaacttttcttgattctctaaaaactgtccaattttttccttgcataaagccaaattagacacagaaaatggcacatgttcccttacttccactagctaccacccacaatgcacacaggtttcactttaggggccgatatggggccccactcctggtgatactggttgggcttactctcttgggaagtgggagggataggggctagtttgcataagggggaggcgtgagtgatgaccttggggtgggttccttcattgaaaaactggtaggaagcccctcagaattgggggactgaagagaccctggggaaaacgtaagccttctaaagggagcagctaggaggggatcccttaggcatggcattctggtccctggaattaacatgagcctgtaaagagccataaaagcctgtacataagggacgtcttcccattttcctttttacaaaataagtctaattgtaaatatcattataatgtatagaaccatatgtaggccaaatctgttagttttctaatctgtattgaacccaaacagtgctgcaacaaaaaatgagtctcttcttaagacgaatttgaacttgctccaatagcgtaaaagacactccagtgccaagtcctctgggatgcttgctgttgtccccaggtcgactaaggatcgctacagggggtttcagcctaagtttagcaaatgtctagttaattttcccttttaaattcccaccttccagaaaggtgtaaatataaatagcagggtgttataaaagtggattaggagctaaaaatggacagttggatgttgaacctaaattccagagggctgggcagagaggagctaaacaaatggtaactgtggaagggaggaaaggaagggggtaagcagcattgcccaaagggagacctcagaggccctgaccacctgagaacctactcaatagtggagacaccaaaaaaaaatattcatgtggcacagacctgttttagctagtcttcaatttggtggggtgtccaagcccactagactccagagtctagtcccgcctcctacctcaccgtcaacttacttttagcttataaaccttcgtatgtgcaaggcgcggtggctcgtgcttgtaatcccagcactttgggaggcccaggagggcagatcacgaggtcaggagttaagcctggccaacatggtgaaaccccgtctctactaaaaatacaaaaattagctgggtgtggtggtctgcgcctgtcatcccagctacttgggaggctgtggcaagagaatcacttgaacctgggaggtggaggttgcaatgagcggagatcgtgctgttgcactccagcctgggcaatagagtgagactgtctcaaaaaaaggaaatgacaagagattaattacttagtgaatctagggcaatggtggtttgttgtaccagactttgacattttcttcagtttgaaaatttccaaattaacaaggtaaggaaaatccacttggaaaaggctcttgctgtttatggtcaactcaattcccatttgtgatacaaaaacaagcctgcatgttctctttttttctctggagatgcttgtattttgaagcttagagatttacagggttctgagctgaataccgagctgattttccgtgacagtaaaatttgcatttacatgcattcattcacccatgcatttaattgtgtcagatgcccgtactccctaacaatgagtttctaatttctccacctgtacataatttaccaaatataaagaacatcccccaaaagaacaaattcacccagtgttcacccaaactggctggaatcccctggtcggtgaagctgctggggacaaaacaaccacgactccagcaagagattttcttccttctgcagaaagtctgcaaaggctgatgaagaggcttgggaaaggggagaccgcggacgaaaaggccccaccgaagctcgctgcccgcactcccgacccgccttttacctggacccaagcccccagcggcgcaggtgggagtctgggaagaagtgcggtgtcggcaggaagtcccagcgcgacgtccgggaaagccacaggaggaggcgacctgcaggaggctaccctttgaccccaaccctactctccagtcctcctagtctggtgggagcaaccttagactggttgatgtggaaggaggcgggcctgcacgcggagtacggcattcacttccgtttccgggagcgcacttccgtttccaggcatgagggcaacgggggaggggggggaggtgacctggaatgggctgagaaacaggagccacgagagccgcgtggtgacgttagaagggcgctacagccgcgactttccaaagctagtagagagatcccagcgtcccccgggaaaggcagaaggggcggggcgataccaagacggagacaatggggcggggcgatgccctggaggcgggattgcctgtgggagagccacccttcaggccatgcagaccccaggtgaaatctgcacaggggtctcctggagccgtgggaggggttccccttcttctccttcaagagcgtttttatgttgccctctttatggatggaaaacagaggcatggacgggcggtgtaacttggccacattcactaacctaatgaagaagtctctgaaactggatcctgggtcgctggaggccttacaccctcctccagggactatgataaatatcagtctacaagcaaagaaaaactttggaatttaaagccctgtgtactgtagttcttcctatatttttgacaaccaaaccagaacctttatatcacacacatacacacacacaaaccctttttggcattttctaaatatccgtgtgaataaaacacctgccaagacgtggtaggatttaaaagtgatttggggcgggtgttttattcacgtctgcaatcccagcactttgggagacccagatgggaggattgcttgagcccaggagttagagaccagcctgggcagacccctgtctcctaaaaacataaaaaagtgatagggaataaatgtagaattgccataggtcataatttgtttaatataaagctgctacgcttttaggtctgacaaacttcctctccctgtgcggttgtttcctgatataacccacgtgttcctcatctcacagctgctgactcctataaaagctaatgaccaacaccacagtcatgtaaataaattccccccttcatttttttccctagccaatcgacagtcacgtgaagaaagactgaaggacaaacccatggtccttaaaaggcacagtcccacaggccctctctgtctcttcatctctccagtaacctacccacaggttgagcaccatactgtctctggacttcctgtgggccattattcagcacccctaacttctctggaatctataataaactttttcctttcattgattttggtttcactttctcattgtgtctcacttgacacacttgaacttaacatcctccaccagctctcctagagagtggctatctcgggccggacatgttggctcaggcctgtaatcccagcactctgggaggccaaggtgagtggatcacctgaggtcaggagttcaagaccagtgtggccaacatggtgaaaccccgtctctacaaaaaatataaaaattagctgggcatggtgggagatgcctgtaatcccagctgctcgggaggctgaggcatgagaatcacttgaacccaggaggcagaggttgcagtgagctgagattgtgccactgcactccagcctggatgacagagcaagactcttaaaataaaaaaattaaaaaaaagagtgtggctatattggcttttggcctttctcaagagagaaacctcaagaccgagttggaaaataaacattaatactaaaaaatgataccaacgtatgatccagcaattccacttctgggtatattaatcaaaaagttgaaagcaggtactggaagagctatttgtacacccatgttcatggcagctttattcacaatattgaaaaggtgaaagcaaatcaaactgtggtatagccatacaatagattatccagccttaaaaaaggaaattctgagatgtgcagaatttgaacatgaacatgaacatgttccttgaacatgttccttgatcatgaacatgaacatgaaccttgaacatgttacgctaaatgaaataaactagtcacaaaaagtcaaatactgggacttcacttttatgaggtacctacagtagtggggttaacacagacacatgttggaacaactaagttcctcttcaaagactcaactttctgatcataagttataaaagttgtacatcaatcctaccccctttcttctcttctgtttccacaaatcgcacatttaccctatttggaaaagtttaagtcttagccaatcgggatcagcttagattgtgcagtccaatcccagccaattgggggacgacacagaaacaggaactgcattaaattaaaaactccttcccttctttgttcatcgtgctcttgcgatcgtaacgggcacaagcagcacccttctgcagaagtaaaggtgccctgcggagaaattttctagggggtttcttttggctatgtcgagcacttgtttccaacagagaattgaatggtgtttgccagagattgggaagggagcagtagggagttagtgtttactgggttcagtttgggaagataaacattttttagtgggatgatggtgacagttgcccaacaatgtgagtatacttaatgccagcgaagtggacacttaaaatggttaaaatgtaaactttatgtaatatactttaccacaattcttaaaaagtgaatagaggattattagttttatttaatgaagcctccaaaaaccagagatctggggcaaaagaaattcaaaagcagtttggctagcagtgcattttatacagtctctgctaaataaaatacccactgataagtaaagggtttggaattgtattgctaacattagatttatacattagaaacgtgtgtttaaaacagacattctctatcaactggcaaataaaagatttttaaaggattaggttttaaaataagtattaaattagatgctgcaccaaagaatatattggtttaaaaaattgctcagtgccgggtgcagtggctcatgcttgtaatcccagcactttgggaggccaagaggggcagatcatctgaggtcaggagttcaagaccagtctggccaacatggcaaaaccccatctctactaaaaatacaaaaattagctgggcgtggtggcacgtgcctgtaatcccagctactgaggcgtctgaggcaggagaatcacttgaacacgggaggcagaggttgcagtgagccaagatctctccactgcactccagcctgggcaacaagagcaaaattccatctcaagaaaaaaaaaaaaaaaaaaaaaaaaaaaagctcagctgctgtgtcagagaattaaacaatgagttaaaaacctaacactaaacagtatttttaaatgtcctcatcctgtcctcacccagattccaagcatcaaggagtcacgctcttgaggaaaggtgcgccttgtccaggagctccagaagccacctgtgcagaaatttcaccagtctccaagtcctgcagagcagtcacatggcactccagacccaccctgcaatccactgccccaaaagtcaccatggggtgaacacagctcaacattggtggaaggtgtgggtgccttaacgcattcattaaccaataactgtgggctttgctctagagacagaactaaagcccccaccctcttctactctgttagtggagcctgcggtttttatgggcacaggatgagggcggggcaggccatgagtggttttgaaaaaggcaacatttgaactggaaaagaaggatgtgaagttatcactttgggccaatctgaaaagttacgtactgcacaattccaactctatgacattctgaaaaaggcgaaactatggagacagtaaaaagatgagtggttgtcgggctggggagagggagggaggaatagtgggaggaccgatgatctgtggactttgggtgataatgaagtggcaatgcaggttcatgaattctaacaaatgtattactctggtggagtatgttgatgatggtggaagctatgcatatgtagtggccgcaggaatataggatgtctttgaaccttccacactattttgctgtgaacctaaaactgctctgaaacatggattttttgttttgagacagcgtctgactctgtcacccaggctagagtgcagtggcacaatctcagctcactgcaacctccttctgggctaaaatgattctcctgcctcagcctcctgggtagcagggactataggcataagccaccatgcccagctaagttttgtcttttttgtagaggcggggtttcaccaggttacccaggctggtcttgaactcctgagctcaagcaatccactcacctcagcctctcaaagtgctgagattacagctctgagccactgcaccaggtgaacacggatattttaaaagagtaataaaacattttcaattggtcagagttttccaatctgagaagtcaacattatttagctgaactaccactctccaaaacctcttacactaataggatttctctctactgcaaaaccttacttaagcaatccctgagataacagcaaagggctttccatgtttcacagactgtgtggtctcattgcaagttacttcctgctgggttgtgaagagattctgacagctttcccatatttcttacattcacatggctatgaactgtgatacagtaagatatgagaagcaaatgaagtacttcctgcatcctttttataatcacagggttttaccccagtgtgaattctcacaaagatattaaggcttgagcaatgaaataaggtgacaccatatccctgggatacacaggttcttcctccaatgtgagatttcatgttaacattatggcatgtgagatatttaaaggttgccatacattcccctacattcccaggacatttgcagtctaattttattttattttttttgagacagagtcttgctttgtcacccaggatggagtgtaggggtcttggctcacttgcagtctaattttagatatgtaaaatgagcctcgtggaattagtaaaagctttcccacgtgccttacagcagaagtgttctctacactgtgaatttttatttctcatgtaaggtataaacatttaatgaaatctctccacattactaataatggagcctcagtccactctaagtcactaaatgttgggtgaagtcacatttatgactttcatagtaaaagaaactttctcttcttgatggtctttgattttcacagggcctatcaccacaagagttggaagtgagtattaagatctgatgagcacttacagacttcttcacatgtcctacattcatagaacgtctctcctgtgattgcttttgtgtttacactaacactaatgatagctaatgaacggaaaaaataatcacaaaaaaattttattatgtttgaagaaagcttaaaaatttgtgttggtctgcattcaaagccatcctggcctgcgggttggacaagcttgatctaaagcttttcccaagttcctcacagtattagtttcctagggttgctgtacaaaataacagactgaatgatttaaccaagagaaatttattgcctcacagttctggagcctggaagtgcaatatcaaggtggagacagggttggtttcctctggaggccataatgaaagcatctgttccaggtctctgtccttggcttgtagatggccatcttctggtggatccacacagtcttctccatgtgtatccttccttcagtttcccttatagggacaccagtgatgtcagattagggatcgaacccaacaacctcatttgaagttactcacctgtttgaaaaccctatgtccaaatacagttatagtgtaaggaactaggacttagggcttacaaatatggagtggggcatcatccagaccataccatttaaattgcagggtttctctccaatgtgagttcacatacacacattaaggtttgtgggattcagaaaggtattcccagattctctacattcatacagtttctctccagtgagatttctgatgtgtttggtaaggcttgagaattcagcaaagtcatttccacattccctgatgcagggtcttctccactgtgaattcatatgtgttcattaagacctgagatacaaagttgcttccacatttttacattcatagggtttctccccagtgagttttcatgtcttcagagagaacagggacacctttaggttttcccacattccttatgctgacagtctctcatccgcatgccttctttcatgatttcgaaaggaactggaagaactgaaggctttcccgcactccttacattcatagggtttctctccagtgtgagttcgttcatgtaactgaaacgaattggagtaactgaaggatttcccacactgtttacatttgtagggtttttctccagtgtggatccgcatgtgaaggttaacacacgtgggaaacttaaaagctttgccacattccatacacgtgaatggttttttggcgctgtgggtccgcatgtgattattaagactggaggaatgcgtaaatgctttaccacattccaggcactcaaagggcttctctccagtgtgaattctcaaatgtccactaagatttgaagaaatagcaaaggctttcccacatttgacacattcaaaaggcttctctccagtgtgagttcttgtatgttcactaaggcgagaggatctggcaaaggcctttccacattccttacattcatagggcctctctccactgtgagttcgtgcatgcttagtaaggtctgagttctgagtgaaggctttcccacaatccttacatttatagggttttattccagtgtgaattcgaaagtgatcactgaggcatgaggaatttctaaaggattttccacatatcttacattcaaagggatcctttgcagtgtgagtttttaaatgttcagtaagttgagaagatctagtgaaggctatcccacattccttgcattcataaggcttctcacccacatggattttcatatgttgacttaagcaagaggaaacagtgaaggctctcccacaatccttacatttataaggtttctctccagtgtgagtttttctgtgctgagtaagttgacaagacctggtgaaggctttcccacactccttacactcatagggattgtctccagtgtgggttcccatgtgaatattaaggtatgcagaatatctaaatccttttccacattccttacatttgtagggtttttctgacctgtgagtttgtatacgcacagcaaggtctgtggagtgaataaagcctctcccacattccttccattcatggagactttctccattgtgagttcttaaatgtccctgaaggtgtgaatgattaatgaaggatttcccagagtcactgcaatcaaaagctttctctcctgtgcacgttctctggcaaacaacatctgggttcaggctgaaggcttttccacactgactaaatacagaacgttgctctccagtagaggttttcttgtgcagagtaaggaagtctactccatacagataacactcaaatgtgttctcactattttgagttctcacatgtgtcttaaggcatgagtgttcactggagacatctccacattgcttaacatcactgacctcccctccgttgtggcttcctatctgttgataaaggaatgaatgatgattaaaggacggttcagattgattaacagattccactcatctgaagagaggaacactgtgatgattattatcatgtttaccattttcattacacacatataagtaatgcccttttgatttctttccagcggaatgacaaaaaactcctgccaggctgtgccatctactctaatctcaaatgtctgtagagttttatgaaattgtcttaaaaactcactatctagttacaaatgtgtacttgaggggaactctaaaacacctaagtgttggctgggcgcagtggctcacgcctgtaatcccagtgctttgggaggccaacgtgggcagatcacctcaggtcaagagttcaagaccagtctggccaacatggtgaaaccctgtctctactaaaagtacaaaaactagccgggcatggtggcacgtgcctgtactcccagctactcagcagggtgaggcacaagaatcgcttgaacccaggaggtggaggttgcagtgagccaagatcatgccactgcattccagcctgggtgacagaccaagactctgtctaagaaaaaaacaacaataagtgtcaagctagatttcaagcatccccaggtcatcgtattctgagtctctctccagagtcattatcccttttgggaatgctacttatctcaaagagctctcattctgctaattttctttttcttttaatgtaattaaatttagtttttagcgccaagatcttgctacgttgaccaggctggtctagaactcctggcctcaagtgatcctcccacttcagcctcccaaagtgctgggattacaggtgtgagccaccattcccagctttattctgattttctataatggaatccccaatcatctctaaatgtgaaaactaagacgtatccttgttaatcttaccatttgaatcccactggaggttggctcccccaaaacatcctgctgaagggctaactctttggttttaagttgcactttccattctgaagctgaagagaaaaagaaatgtaagggtttggagacatacagggtagacagatggagctgaaaatgagagggatcatttgtacttgttttctttttttcttgagacggtgtctcactctgttgcccaggctggagtgcaatggcgtggtctcagctcactgcaacctctgcctctcaggttcaagtgattctcctgcctcagcctcctgagtagctgggactacaggcacatgccacaacgcccagctaatttttgtatttttagtagagacgagatttcaccatgttggccaagctagtctcaaactcctgacctcgtgatccacacgcctcagcccctcaaagtgctgggattacaggcattagccaccacacccggcccctgtatttgttttcaaattaaacacggtaacaaaaaacaaacacaaagacagatttgaagattgtatatcaaaaatttggcaataataaggatatagcgtcaaaattttacatagtttactacaaactgattctatgaaaattataaactgatggtgaacacaaagaatattaccatggaaggaaagttgaggaatagaacaaaaagcacacatcaaaacaaggagcttgtttttgttttttgtttttttttttttttgagaaagactttcactcttgtcactcaggctggagtgcaatagaacaatctcggctcactgcaacttccgcctcccaagttcaagcgattctcctgcctcagcctcccgagtagctgggattacaggcacctaccaccaagcccagctaatttttgcatttttagtagagacagggtttcagcatgttggccatgctggtctcgaactcctgacatcaggtgatcctcccacctcggcctcccaaagttctgggattacagacgtgagccaccgtgccaggccttttttttttttttttttttttttttgagacagagtcttgctctctcaccccagctggagttcagcggcacgatcttggctcattgcaaccttcggcccctgggttcaagcgattctcctgcctcagcctccctagtagctgggactacaggagtgcgccaccacgcccagctaatagttgtatttttgtagcgatggggtttcaccatgttggccaggctggtctcaaactcatgacctcatgtgatctgcccgcctcagcctcccaaagtgctgagattataggcgtgagccaccacacctggcccaaaacaggaacttttaaagaagaaaccaacgggtcctatcacagaaaagaatgagtagacaaagcgtaaaagtatgagaagttgaagatttcttaacttctgagaaagaaatggcctacctgggcatggtggctcatgcctgtaatcccagcactttgggaggccaaggcaggtggatcacttgaagtcaggagtttgggaccagcgtggccaatgtggtgaaaccctctctccactaataatacaaaaaattaaccaggcgtggcacacacctgtagtcccggctactcgggaggacgagtactcaggagaattacctgaacccgggaggctgaagttgcagtaagccgagatcgcaccactgcactacagcctgggtgacagtgaaactgtgtctcagaaaaaaataaaaataaaaaaaataatggcctcaacactgtgagatgaagcacatcttaaaaagtttcctcattatggctaagcgtggtggctcacgcctgtaatcccagcactttgggaggccgaggtgggcagatcatgagatcaggagtttgagaccacactgaccaacacggtcaaaccccgcctctactaaaaatacaaaaattagccaggcatggtggcgtgagcctgtaatcccagctactcagggggctgaggcaggagatcagaaggctgaggcaggagaatcgcttgcacctgcgaggcggaggttgcagtgagctgagactgtgccacggcactccagcctgggtgacagagtgagactccatctcaaaaaaaaaaaaaagtttcctcattatacttataaacatactgaacttattgaccagggcggtcctttgtgaacactcaccttggaaatcacctctctgcactgtcctagactcttcttgttccagccaagagatcagactgggtttgaagagctgatatcctgtgcacaaagaaagatacattaccagaagaggctcatgcaagagatgataaatctttccacaactcaggagatatagttccaatggaagcagtgaaattattttaaaagggctaaaaatgcaaatatcgtctgtctgtgcccccaaaagattggtgatctctgatccctgaagcccaaatccaggctgatgtacacacttacaaagcactaagacttttatccaaataggaagttaagtgaaacaaagagatcttcattctcatgggaaacaactatacatctcattcttcaacattatagcacatcagattcatgagagcttgttaaaacacagatgacaggggccctgttgcagtttctcactgagtatgtcaaaggtggagactgagaacatacatctccaacagtgctggtgatgctcttcatctgacaccacattttgagaatcaccaagtagatgaaaccctattagggcagggactatgtctgttatttcccattgtgttcagagttgctatctctgatgtgcaatacagtaagtacataacataatctgttccatagtaggctacaagggatgaggccagtcttacctactgtggccaaattcttgtagttctccagcatcacatctctgtagaggtttctctgagttgggtccagtaaagtccattcttctggggtgaagtccacagccagatcatcaaaagtcactgaatcctaaaccatcacacacatgctggcttgagccacaaaacatgtctaccagtgttcactgcaaaatgcaatacctacagagtctgagggctcacattgcccaccccaggaggtcctctctatccacactcactcactgtcagtcccctccagtgacacggcttgaatggcacttcttacacatgattgtatgtaacacaaccagactgggaggtcatctgatttccctccactgcagcacactcttgagcagatgctagataaacactgatgaatggaaagattatctcaaaggatactttcatgtcccttaccatgtgtcagaacactcaacaaaataaaaactatgcagttgggaccatgagggaagactaattaatcaatattgaaatactgggatgacattcaaggcaaaccctcaccaatatgacaggctccactccttccgggaattcgactagggactcagtccttgaaggaggctttatttgctttaagaagctctgaagataattctgtgtagaaggaaatgtgtctacctggtgatgcaagtatgatattttggagaaggatatacttcctgcatacctgataacaatttgtcagacagtcagccaccaccctttctacttctgtcttttcttgaaggcagactgggtccctgtaaagacctcatggaaaagaaagaaggcatgagaacccagggctgacgataattcccacattcacgtaccccaaagtcattccatcctactgtgagattcctatatactcccgcacactcaagaaaacacacacatacacaccaccgctatcaattccagggcactactgcctcacgtaaaggcaaaaaaaaggatagtcagccatgctgcccactgggaaaagggtaacagtcttattttacagataaggaaaacttctcttccctggaaagacacagcacctcttcccaaagcacacacagcagggggctgatgaagtattctggctgggcgtgatggctcacacctgtaatcctagcactttgggaggtcgaggcaggcagatcacttgaggttaggagttcgagaccatcctggccaacatggtgaaactccatctctactaaaattacaaaaaattagccaggtgtggtggcacacgcctgtaatcccagctactcgggaggctgaggcaggaaaatcgcttgaacctggggggcagaggtggcaatgagctgagatcatgccactgcactccagcctgagcaacagagcaagactctgtctcaaaaaaaaaaaaaaaaaaaggaacaaagcattccctagcccacatcagcacctcagaaatgaagctgcagcgtgaatgatcaggcacaggccactggactccatactgtgtggggggggacacctaaagcagggtatctgaaaatgaacagaaacaggacttaccataggacaaatcagtggctgccatcccacagggctgatggctgaatgtgcttcaaagcacctttcctttactccaaggatcactccaggacagcttaggaatctacacggacagaggtaacctccattctctttatccagggttaacggtatcctgtttgtataaatcattaatcaacaagcattacttatcagtcatcagacatcattagcactctctctgcagagcatatagaggaaaagacactgaaaacggtgtacactacaaatagtaggaagaccaacttccactactgaggaacagtgtgtgtcagaagtcacactagcagctttatatactcgcttaattatcataaccaccctttacagtagataccaatgacccctatttgataaagaaaaaatcaggccgggggcggtggctcacgcctgtaatcccagcactttgggaaaccaaggcaggtgtgtcagttgaggtcaggagttcaagaccagcctgggcaatgtggtgaaaccccatctctactgaaaacacaaaaattagctgggcatggtagtgcatgcctataaatcccagctactgaggaggctgaggcaggagaatcgcttgaacctgagagacagaggttgcagtgagccgagatcacaccacggcactccagcctggcaacagagtgaaactctctctcaaaaggaaaaaaaaaaaaagaaaaagaaaaaaaagaaaacctacaatcagacaacacttggatttggtccagaatcatccagtttggaagttgtgaaccaggacttgaacacaggcaattttgtccctgacacccaatctgtggctgctcttactttcccacatgaccagcgttagtctaaacctgcacagtacaacaccatggtcactacccacatgtgttattgaacacccactccatataaaccgagtatgacccaacaacagaatgtattttaatttaataaaatttatacaattaaaataaaatttaataaaaattaatcacaatctttaataaatcaaacacagaacaacagtgcaaatgctgattgacagaatggaatctgaacgatgaaaatcactgaaaactgaacagttcattatccatgaaccagatacacccccacaaggacgctacagcctttattctatgaatgagaaggctgaaactctgaggtcacactgggttacagaaaccccatgtctagactcctggtgtagattgtacccactaccatgggtttcaaactggggatccttaggctgaagagggccacaaatgtgtttaatttggtgaaatctaaaccaattatgttattttaaacttgaaatgtaattaatgtacaattaaaagtacagatcttaggtattcagtggatgaattttgacaatcgcatacacttgcataatcaaaagcctaaacaagatataaaacatgttcgtctccccatgaaaaccttcttgccccttccagtctatcttttcactctcaactccagataagcaccctgtgatttccttcatttagcagacacaacactggacaggtaaattaggcagtgtgctcatctctcgcaaatgtacatcctatcttcatttttctctactatttaaataacatgagataaaaattctaaaatctcccactgcaactgtggacttgtctatttcttcttgtgtatctgtaatgtatactcctttatacatcttgtaacaacattactgggtagatagatacacacattgaactttcctatttttggagcaacaaaacctttctttttttttttcttttgagacggaggctcgctctgtcacccaggctggagtgcagtggcgcgatctcggctcactgcaagctccgcctccaggttcacgccattctcctgcctcagcctcccgagtagctgggactataggcacccgccaccacacccggctaatttttttgtatttttagtagacacggggtttcaccctgtcagccaggatggtctcgatctcctgactttgtgatctgcccgcctcggcctcccaaagtgctggattacaggcgtgagccactgcacctggccacaacaaaaccttttttttatcataaggaactctgcgagtctctaggaatgttcttggatgatgctgggtgacactgcaacttgcttttctttgtggagtctctgtatctcatgggcagccttaggtatctttgggtgccaatgttccccttgacctggcatggagcctaaaggcacccagtgatggctggacagacaactgagatccttctcaacactgttaaagtacacccagactacagccccatcacaattcataacacaatatgcatctgagttctgaggaaatgcattgaactactcaaagaatgcaagggtgacaggaatactgtctctttctatgcacttagccaccacccatggcctgtctgcataccaaagactggtttcccctggccacttaatgtggatatttagtgctctcagtcttgtatccttactggcaccccaacttcctctgctcatgagcacaatagccagggttgcctgcattccagagggctgcttcctgctttccccgagtccaatgactagctctagtacccgctaaaagtgcagagcagaagcactacagccccgctaaaggctgaccctgaagggggcagtactaaaggaaaatcttccgagtggcagaacttcaggcagtgtattggcctgcttctgggtctggagtaagagttgacaagatgcatgcatacacatacacagattcatcaaaagttgccgatggcttggctggatggtcaaaaatgtggaatgaaccagagtggtaacaaggaaacctaggaaaaggtatatggatggacgtctctgaaaggaaagattgtgtcccacgtgaatgcctgccgtgatccactagaaatagagcagacaaaatcacgtgctctaaagatacctgttactttacctagctgcacctcagtgcttgctcaatgggcccattaaaaaatgttcatgacagcagggataaaggctatgtgtgggctcagcaataaggacttccccttaccaagtctgacccagctaacattactgctgggcctaatctcctgaaagcagaaatcaacactgagcatccaatacagcaccattccttagaggagaccagccagccatgctgtaatgggccctcttctatcaggaaattgtcaaagactcatccccaccagaacagactcacgttccggtgtggatctgcctttcgactagttaggcttctgctggcaccaccacccacggaatcacaacatgctttatcagtagtcatggcctccacacaacagagtttctaaacaagcaaagcatttcactgcagaggaagtgcaacaatggaagcatgtccttgaaatcaactggttccatcacacaccccatcactcagaagcagtggatctacatgaaaagtggaatcgcatactgaaaactcagttatagggccaaatgggggacaacccttagaaaggaattctgactcacaggtcaaggtgtacgctttgagtcataaagccttccatggtactgtctccccagagtcagaatacatgggtccaagaattgatgagtaggccaggcgcggtggctcatgcctggaatcccagcactttgggaggccgaggcaggtggatcgtttcaggtcaggagttcgtgaccagcccggccaacatggtgaaaccccgtctctactaaaaacacgaaaaattagctgggcgtggtgacacatgcctgtaatcctagctacttggaaagctgaggcaggagaatggcttgaacccgggaggtggaggttgcagtgagccgagattgtgccactgcactccagcctgggcgacagagcaagactccatctcaaaacaaaacaaaaaaatagaattgatgggtgaaggtggaattaactccactgacagaagtttgcttttattcccagcaactcagagcactgctggtctggagatcttcttagaccctagaggaaaatgccccccccagggggcacagctatggttctaatgcattggaacaggagactgccacttggcccttttgggcttcatataccactaaaccaagaggcaaaaaaaaaaaaaaaaaaaaagaaaaaagttaatctactggctggagtggttaatcccaattatcaaagggaaactgtggcactactagacaattgaggcaaggaggatgaagtgatgaggtgtagaacctccgagtacttctatactccatagaaaaggttaatggaaaaccacaactgaacgaaagcaggacaacagaggattcggactctgggcgaacgaagatttgtattgctcctccctggtacaaaacccggagcagctgaggttcaagtggagggcagggaaaatatggaattagtcactgaagaagtaaaccatggacatcaactacaacctcaagagcagtgacagaaacaagaaatgtagttttgcatgttttctctctgcttgttatacgtatgtgtgtttatatccatgtgtttatttatttaaatgaaccatttacttctatctttttcccacttttattttatatacacattattagaggttacatttataattttgtctttaagaaacagaatagttagaatgggactaaatttgaggagtaattgacatggcgtgccatgggaatacaaaggactgtttgaactgcgcatctgctcctttgggggtgggtgaggacttcttccctcatatcttcttaggtaggaatatagacttgtttaattattccaaagaaattcctatgtgtgtaggagagtgcatatggatggtaaagaaccaaaagtgaaatatgccagttagctgtttatttatctcagctccaatacccccatcgtctttgtcttagttaaaacttcccctgcctgtgtagctgtttgttatacagcctgcttgttcctcacctcactggccccaaatccaacacatctcacagctgctgactacagtgaaacttagtggccaacaccagagtcatataaataagaactttcctttgcgcaaccaatccacaacccccaaaggaagtcctgagggataacgtccatgcaccttaataacgcaaggcccaacaggtcctctctcattcctatcccacaggttgaacacccggctgtctctggacttccatcagcccccgagagcagcctcccatcctggggatctgtgagtaggaggatgcttctgacatttcatgtgttttgttgtgctgcctcctctacatcttgcccgcccaacacactggaatgtaactctcctcccggtctgggtagggctagaatttgcagccactctccagagagagagagaccccctagaccaaaacagaggaaaatatattcagtgtggtgaacagggtgtgtggtcacaacctgagggacacaagaccaggccttcagattgctcttggcctgtttactacctggcccactcacatggctgatgccatatgggagggctccacagcctgctggggtacctctctgctgctgtgcattgctgcctgttgtctctgtgaagcactgccaatactcccatccctaaattgggtgggtcctccatagtccaagcgctccctaggactcaccaactgctagccttaagagggcaagaggggcacgacagtcactatccaagactgctgtcacttccccaaataggaactgctgggctggaggaagccaactgtattcccaaggcctcactctggcataacgggcttgctactgagaggcagaaggggtaaggcaggcgctgggccaatcaaagggttagcggagtgcaagaggaagaccggcattctgactgcccactgtatggataagcagtacagacgaggccaccagacttcccactctgacaacagtagcaaccccttcactggggagatgacggcacctcgctggcaaggttgctgttggggtctgctatccccaggacactgccttccattgcatctgttgctctacgcccccaccctgacgaggtcaactgggcaccctagagagaaaggcggctgcctacaaaggggtcagatgggaagcacaaatggaggccagaggacccggggccactcgggaccaccgggagcttgtcaggtaaacaaaggaaaaaatattttagccacctggagatacaagccattctgaagattttacttagaagaaaaaaatagagggaaagaaactgattgtcttgaggtctggagttcccagtcctctgttgcctagaagcactgggcgccttacccctccttcttttcctcttatcaaccagagacagaaattaagaacccttcaggcagttaaaagtctaagaccaaaaaaaaaggaaaaaaagcctcgagatttaggaggttacaagttcaagaaaaaaaaaaagaggaactttttgaactttaagtactaaacaaatgccaggtctaacaaacataatcccgctggccctagattacttaatgatttaaacacagaccatgagacatggggaaaaaaataaaaggtaactagactttaactaacatttggtaaaatgtaccaattaacaaaactgcataggcctactcaatctggggctcaaattacacttatacctggggatcccactaaattcaaacattgtgctccctaaaatcttaaaagggtaactaaatacaggagaaaaaaaataggtacgcctcgctttaactgtagccttgcttaaatctcccattgtcatagtacccatggccctaaaatattccatattaggtataaatatgctaacataataaataacaaattaaaattaaagtgagactttgacacttacaaattggcttgataaaatgggaccccatggataattagttgaaatatttcacatggcccaatgtaagttacaacagggcctcaaggatgaaaacttctataaaacctaattaatgaaggggtgattatccctactgcttctctatttgacagcccaattgtgcctgctcttgaatctgaaaaagaaaataaagggcacctcatgctggattactacagccttcatactgtggtcccatccatcaaggtgcccacacccaatattattaaaactcctgattttattcaataaacaaccaataactattgtgcttttaattataaatttgaccaacatgtttgtttgtttttttttctgagattgagtcttgctctgtcacccaggctagaatgcagtggcacaatctcggttcactgcaacctccgccacccagggttcaagggattctattgcctcagcctcccgagtagctgggattacaggtgtgcgtcaccatgcccagctaatatatatatatatattttaagtagagacagggtttcagcatgttagccaggctggtcttgaactcctgacctcaagtgatctgcccacctcggcctcccaaagtgctgggattacaggtgtgagccaccacacccggcctggacaacatgccctgttcagtgcctatttcaacagcctctcagctgcagcttgcctctccctccaatgggacacaacacaccttttccaggctacccaacagatctgtcatcacatacgatctttgcaaacgagatcttaacaacatccaccttctccaggaacacaggtatgcaccgcaccgataacagccttccccaaggaaactcttgacatgtcattaaggggaagtaattccagtatcttttagtaatttttgggttctggtggcaacatatgcctgatttacaaattataatttaaattaaaatcaacaagcactcctattaatgcctcgaagaaaaaaaaaagaaaacggggggaaaaatcaacttcctaaaaggactcccttcatgctagagactggcaactttttaaatgcctgctggagtctctagaccacttacgatggtcattagctgccccaggccgtctaggagagactgcccctcctgacttcctgttattcaccagtaaaacaagtgactggccatctactgggctctcctggaaacagaggatctcacagacctgagcctgtgatcctcctatgcagctgcccactgtgctctaggtcagggaaacaaccccccataagctctgcctggccactgaggcctccttaggccacgatgaagccaatctcaggcccttgggtctaatccacccgcagaaggcagtggcttcccctgttctcagtcccttgcctgatgccagcgtgctgaaggtggtcactcctccctcccacaggtcccctgactacctggaaagcccctgggattaactaagtgaacactaatgggagttcatagactgtgcaaaggccactgctgaccattataagtgatggggctcagtggaatgctgctgccttccatcccttagccaggatgtccctaataaaggacaggacccaagaaacaacgtgcctggccaaacttcaggcagctgtcttagcgctggatgcccaggtcaacaaaccgacccaccttcttcatggttacaataaactattgggtcattacctaaaaactgtcccttccagggtgggaaaaaaaaaaaaaaaaaccctgggaatctcttgtctgacagatacccaaaatataaagcaaaatcccatacctctccaaacactaaaggcacaatacgaggccttgccaggacactacttattcccttcagagttacagacattattagtaacctacatatatatttcacttcttttttgtcaatttaattttttttttaagaggcagggtctcgctatgttgcccaggctggtctcaaactcctgggctcaagcaatcctcccacttcggcctcccaaactcctgggattacaggggcgagccactgtgcccaacccatgtttcatttcttaaaatacataatgctagcgcctcgaaaaatatattcaatagaactttcatttccctaataggtctcagataactggtttcactgaaagacagaaaaatgtcctcaaataactacttttcaaattccagtccaaaaaacaaactcctgaaattctctatcatgctctagggcttaacttattttcaatcttgcccccatcccacaaacactgaaggccaaatcgagggtgcacagtcgcctgggacttactaacattagattgtcccagaggcccggcagctgctcatctgataggggacccacctgaacctaaacttccaccaaaagacagaaacaaaaacatgttgtcaggtacagctacatatcattctgttaacggttcgtcttactagatgctttgttggtttacaacctagagggccacatctacttcaatgggtatccactttataccccagtgacatcctagacgaccttgtcctagcccaaaatatcaccgctggaaacaacattgcctccagcaacacagccctgacccaagactctgatggtggagatgactccaccattacactaaaacctccacacagtgacatccgtggactgcctctcctaaaacacaaatggacacagaacatttttttctttctgaactgtctgcttagcccctgatcctggtagcgtacttgcattctgctcaaatgtgcacacccacatacccaagcctgaaggaaaatctggtaggagttactaaaattaatggagattactgttttccccaagaggcacctgcctcatgtcggtaaactccttaaccccagggaggggaccacctactccatgatgccttctaatgaagaaggaattcatgaattttacaagtacaatcaaagacgagcaaaaatttttactttttcctgcaaaagctaagtgtagcgtagcccctcctcctaccccacccccccacccagtagcctaagagagaatactaactgcctgtttttccttctgtgctcagccagccttatctgtacttgctagtttcacactccttgaggctcagtgagttcctgcttcacctccctagcgcagctgcaaagttacaaggttaatacagaaacatggtttcccagggatgtggaacatgtagtatagataaatgtaaaagactgatcaactgccttcgttctcgcttctgtaagtacgcttcctgtatcagtagctcccggccagagtgctttaaaggtggctgctttctttgtccagggctcagactttcctggatgccagtcctcctgagccaggtgatcaccttttaaagacctttcctgaactcactctgttcagtctctcccatcgttgatcgtcccgcaacactactacccttctcactttctatcttgacctccagccttgcctatccaaccacaccactcttgccccttggttacacacaataccactaacctttacatatgctttactaaatcatcagctcataccctccaacataactgccctacatctatttttaggcctgacataagttatttggaacccagtcagaccccatcacctttggcttacttaaaactttcccctccctgtgtgctgtttgtgacatagcctacttgttcctcacctcactgaccccaaacccaacacaccccacagctgctgaccataatgaaacctactggccaacatcagtcatgtaaatcagttctccccactgctcaggtctacctaatccacaaccacgctgggaaagcctgagggataaggcccatggaccgtaacaaaggcacagtcccacaggtcctctctgtctcattccccacccactggttagcacccggctgtctcctgagttgctgtcaggacctcaagggcaaccctcttctcgcggatctgtaaggaataaaatgcttctgctacttgatgtgttttgttgtgttgccttttctgtacctaacccacccaacacaccagaacacctctcctcttggtcgggacagagctagaatttacagccactctccagagacagaagcctcaggacctaattagaggaacatactaaaaggggacatgggatggacactgcaaaagggagcgttgcctgctggatacaattgcgacacggtggtcagcagtgtgggtgtgagggcattggagggtgctctgtccacgccatatgcccataacacagtccttaggataccacaaaaccctggcccagtcaccaccaccctgtggccctcctaatatggacgccacatgctcaaaggactcccactagcagaggcaccctctgcacatgtgccgactggcttgatggcttgtgtccctcatgacacagacaatgcgcatgccaggatgcatgctgctgcatgacctgtaccccaaaggtttgttcccaaaggcctccgaacgtgaacactgaagtcccaggccttgcaaacaaagtggcatccaaatttcctgtgcatagctgcccatcaccatcagtgtgagtgtgccccagaggtgtgtttgtcacagcacttccagggcagacacgaaccagtccaagcctcatagctacagtggtgtcctgactccccctacaggctgatccacccattgcagctggcctttgccttgaaacactgcttcaatcttccctaaggactatgactaactcccgcctgagtaacccagcaaacttcaccatccagtgggctacagccacactgtggccaaatactgtaatatgaccccagagatccccacctgctggcattcatacccctggataacaccctcctgttgagcgcacgcacgacctttgaccagtttctaacagaagaataagcaaaaatgaagagaatgcagatgtaattgaggtctcaagtcagttgggttttgttttgttttgtttttagacagggtctcactctggttgcccaggatggagtgcagtagcgcaatctcagctcactgcagccttcacctccctggttcaagtgattctcctgcctcagtctctcaagtggctgggattacaggcacccaccaccatgcccggctaatttttgtattttttttaatagagtcagggtttcaccatgttggccaggctggccttcaactcctgacctgaagtgatccacccaccttggcctcccaaagtgttgggattacaggcgtgagccactgcacctggcttacttttatcttgatacacatagtgtatacattactgttgctgtagggcatgtatgtgtataaacctagtatgtactgccaacagtttttgaaattggtttgccaatacactctccaaaaagcagtatatgcacatcctcagcaactttatatcagaatccccatcaatgatttcactacatgcggctagttcactggaacccctaagtgccaaacagagaaaatgtatagaatttaagtcttcacttaaagtcatcagcaggttcttggaaactgagactttaagcgaaatgacatacaacaaagcgaattttttcacatgctaattaatataagcgagttaagctcctacagcatatttctggtcacaaaaacatcactaaacttctaaataaagaccccaaacacttctaatattaaatattgaaataaatgtgaaatatatatacatttaagaaagactaataaaaataggctatttatccaatttttgatgaattggtatgtgatggcagttaacagtggtgggttaaaacaaataaatgcttccaaagcaaaaactctaaggaccacctcctaccaccaagaagctcaaaaacaataacaaatggggccagcttgctaagtggtaccatttactgttgtacagttgtatcattatcaaatgttttaggaatttttattttacaatagtttgtattcattcattcattctccaatccacctattccagttccagaatgaaaatggccagagcccatcctaacagctcagggcacacacacacatagtgggacaatttagacacaccaattaagctaacatgtgcatctttggcatgtgggaagaaaccagagtacccagagaaaacccatgcagacatgggaagaacgtgcagaatctacagagtggccctactggaatttgattttttttccgtcatcgatgttataattaacagacattattctaagatctgttgtatttccaggccatgtggccccttcacagctttttggcagcccacattggcaggtgagttttctggtcatttacttacatggattgtatcaagccaaccccctaggtgtatgagtgtctataaggagtcacgcagagtgcttactctggacattccttcagggaaacgaaggactaatttaggtaggagaaggaacccaaaagtgaattgaaaaaaacaacgagagaagttttgtctgtttatgaatatacatatttcctaagactaataattaacatcagtgaattttcatggagagcttatttttcagtgatcaagcactgattctcattaatcccttgaattaatttcttattcatgtaattaaaacacattcatgcttctcctattttcccttgatttacatcatttgtcagatatcacttactttggccaggcacagtggcttatacctgtaatcccagcattttgggaggccgaggtgggtggatcacttgaggtcaggagtctgagaccagactggccaacatgctgaaaccatctctactaaaaaaaaaaaaaatacaaaaatacaaaaattagccaggcatggtggcgcacacttgtaatcccagctactagggtggctgaggcaggaggatggcttgaaaacccaagaggtggaggttacagtgtttcagtgagccgagatcctgccactgcactggagcctggcaacagcgaaactctgtctcccaaaagatatcacttactatttcctgtcatacatttaagattaaattatcccaccacattgtttccccaaccaaagaaagaatactgactctgtcaaacctgggagtaatctttgatgcactcctctctctcaccatagaagtggagtcagccaattcacagaatgctttgcccagctcttatttccttccccttcagtatggctaaatcataccatatttttggtctcagcttgcatatcactcttttcttagcattgcctattccaaagaaaaatagagaaaataattctgtcctctactttacttacagaccttcatcaatttgtaatacacttatttgcttggttacatgacagcctcctccactagtttacaacctccctaagaacagccctaggctgaatttttttactatgccttaattaaccattcagacactcatccatttacaggatacaccaataaatgaaggatacatttaaacacggcacagaatacaatcagaactaccaaaatgtataactttctgaaagaacgagtgactgcgcaaaaagacaatataacggataaacagtgtctgctagttttaaagagactaaaagacatgaaacttggatacgtaatagatcccaaaacaatcaaaaccatatattggaacaaagtggagaactgtacctttttacacagggtacatattaacaacattttaaattttctggggtaatagtattatggttttaaaaggacatgtctttatccacaggacacgtattaccaagcatttaaaccttaagtgtcacgcctgcaatgttcaacttacttcaaagcctccattccttcttcctaaaagcccgttttgaagctctgtggggaggtacaggcctaggaagttcagataaaaagaatagctgagtattcttgcttttcttcagtagaaagacttctggtctacaaacgtttatattcacatagagaaataaccacaccccagatacctaaaaaatagctttatgtttctacctgaatgtagagtgtcaaaagtaaatacaggatgcgcaaagagaaaaacaaattctcagataaaacaggaggaagaagcccccgaaaccaactttcaccccagtactcaccgcgacgagctggactcgccaggtacgggagattggggggatgaaggaccagtcaacctgattcgaacgacgaaaactcgttgtttctggaaaaaaaaaagtcacaaagaattgctttggaagagtttgaagcggcaatcaccgtgtttgcaaaaatcgtgaggaagcgcccttacgacagatcccgaaacggctcctggcccagggccgtcgcagtgacaactcgagtggctttttgaacctggcggcgccaggaggacccgcgcggccccggcggacgcgagcggagcaggcaaggtctctctaaggaggcccctcggcggcctggggcaaaccggtactttcgccaccccttccaccgctggctcccacccgtcatccgacctcgccaaagctgtattaagcccaaacgccaccaggaagaaaacgggtttggcggcgcggagaaagcgccggaaaacacagcagcgctccgtgacgtcacttccgcctccagcctcaaacctggaggagcgctcgggaactgcaacctcagccgagctgaacaacctcaggcagagagattctggtttactccccagtggctacggagacgccttggaggccttggagtctgctcaccttgagggatggaggccaaaaggggcccagagcacaaggctgaggttagaaccagccctgcggacggggctaacctagggtggggtcggtggtgttggcaaagttagaggtgggggctcccccacaggatgtgcacaatgctcacaaaaagcttttattctcacctcctcccacgttcctagcaccctcaaaatgatgcttcctttgataatcctgccagtccatgatatggcctatctcctccattcattcaatctagttttagttttttattttgtttttgtttgagacagggtctcactgtgtagtccaggctggcgtgctgtggggcgaaactcatgggctcacgccatcatcccgcctcagcctcccgagtagctgggtctacaggcgcaggccaccatgcccggctaattttttttcccccagagttgaggtatgttacccaggctgatctcaaactcctgggctccaacaatcatcccgcctcagcctcccaaaaggctgggattacaggcgtgcaccacggcgccgggcccaattcaacttgaggccaatatttccccttatttcatttatctggacgccatgctaaattctaatagttgattcctttgtgtattcaatatgctgatactttttgtaaatgttgatttttttttctttgactaatatattgttttctgagatcttacagtgagttccagggcctcgttgtaaaataccgcgttgtaaaatagcactgatatcaggcattcacttctgcaggagtgattctagtttctccagaaatcgtttttgctgtgctttgtagtgggtggcctttatggagttaataaagttattttgaacactgttttactaacatgaagaactgttcatgtacattatcaaatattttgtgaatctactgaactggtaactattttgcagttaatttttcaactcaaaaagattttcttttttaagtttcctctcttgcattaagaagtcttcataaactctagattacatatagatttcctaattttcttctgcagcatattactttaaaaacattgaaatctttcatactcatggaatgtgtttcagtatgtggtgtgggatagtggatacaatatctctttcctccagaaacacggccaattattgtagtaccacatattgataaactgtccttgatttactgatttcaaattccatgtttattaaactataaattcctatgtatacctgtatctgattctagactctatgccagtaatacatttacttatgccaatatcaagatcataatcttttcattccagtggttttgtatcaactaataatattccgtggtaataataataataatggtagcttttttgtttgtttgtttttgagacagtcttgctctgtcacccaggctggaatacagtggtacgatctcggctcactgcaacctccacctcctgagttctagggattctcctttctcagtctcctgagtagctgggattataggcacgcgccaccacgctcagctaatttttgtatttttttttttttttttttttagtagagatggggtttcgccatgttggccagggtggtctcaaactcctaacctcaggtgatctgcccacctcagcctctgaaagtgctggtgtgagccaccgcacctggcggtagctgttttttaaatcttactaccctaaatgcttaatagacattaaatttttacgctcccaatgatgtggctattattgtgatttttcccttttggtttttagaccagctgtattgagatacaattcacatataaccaacacagttcacccacttaaagctatataattcaatattttttagtacattcgcagtgttgttcaaacataattttggaacattttaatcacactaaaagaaatctttgaatgggaaaacccatttacctcctctttaagctccagggaaccacaaacctactttatcactacagatttttcttttgtagacatttcatatggatatactcatacaatttatttttatttttgtatagacagggtctcactatgttgcaaggctgatctcgaactcctgggcttaagtagtcctgcctcggcctccaaaagtgctgggattataggcgtgagccaccatgcccggcctaaaaatcatacaatcttttgtgaataacttttttcacttagcccgtttttcaaggttcatctgtattatagcctagatcattctattttattgctgaatgatattccattctatgtatataccatatatgatttgtcttcagttgatggacatatggtttgtttccactttgggggtgttgtgattaatgctgctatgaaaattcacatatatctttttgtgcatactggcttttattttttgagaaatcacagctcactgcagcctctacctcctaggctcaagcgatcctcccacctcagcctcctgagcaactaggaccacaggcataagccaccacacccagctaatttttgtatttttttgtagagacagggttttgcccaggctggtctcaaactcctaagctcaagcaacctgcccgcctcggcctccacaaaggcataagccaccacgctcagctggtttttatttctctagagtatatatctgggaatggaattgctgagccatacagtaactatctaagaatttgaagaactgccacactgtttttgaaaggggctgtactgttttacattcccaccagaaatgtatgagggctccaacttctctacgtccctgctaacactttagtgtttttcatgttaactgtgttagtggtgtgaggtgatacctcatgattttgacttgtatttccctaacactagtgatgttcagcatcatttaatgtgctttgttagccatttgtatgcttctttggagaaatttctgttcaattcctttgccccttttaaaatttgttttctggctgggcacggtggcttgtaatcccagcaatttgggaggctgagacagacagatcacttgaggccaggagttcaagaccagcctggccaacatcgtaaaagataaaaaatcagccaggcgtgatagcacacacctgtaatcccagctactcgggaggctgaggcaggagaatcgcttgaacccgggaggaagaggttgcagtcagccaagattatgccaccgcactccagcctgggtgataaagtgagactctgtttcgaaaaaaaaaaaaaaaaaggtccgggtgcagtggctcacgcctgtaatcccagcactttgggaggccaaggcaggcagatcacctcaggttgggagttcaagaccaccctgaccaacatggagaaaccctgtctctactaaaaatacaaaaaagtagccaggcatggtggcacatgcctgtaatttcaactattcaggaggccaaggcaggagaatcgcttgaacccaggaggcggagcttgcggtgagctgagatggtgccattgcaatccagcctgggcaacaagagcgaaactctctatcttaaaaaaaaaaattccattgagttgcaagagttctttatatattctgaagagaggtccttatcatatatatgatttacaaatattttctctcaataggttttccttctctttcttgatggaatattttagaatactaaactatataatattgatgagtgtcctctgaagtacaagtttaatgttgataattttttgtttgcaatgtttttgatactgcacctaagaaaacagtactaaatccagtatcatgaaacttttctgcctatacttctgggaattattgtaggtcttacatgtatgtttaggtctttgatccattgtcagctaacttttgtggggtttttaaatattttaatttttttagcttaatccccaatgtggtatctgttaacttttgtatgtggtataaagtaaaagcccaaatgcattcttttgcagtatggtatcaatttctcccagaaccatttgttgaaaacattcttttcattcttcattgaattaccctggcagccttgtagatctgttgaccatatatgtgagggcttacttctggactctcaattctattccattaatttgtatgtttatccttaagccagtgccacattgttttgattactacaattttgtagcactttatgaaatccaaaagtgtgactccttcaactgtgttcctctttttcaagactgtttggctatttggtgttctttccatttctatataaagtttatgatgagcctgtcaatttctgctatgaagccagtgctaaattaaaaaaaaaaataacatcagtggaacttgttaaagcatagtaaggcagactttattcagtaccatcacgttaggtatagggaccactgcagtaggattttgcagtggaggtgacagagtaggctaactctgaataattatagcatgagcaaatgggaatttatagtcaagttaaagagtaaaggtcagtgagtggaaaattgccaagaggaatatcaggggtatggaggatggtggataaactgacctaacatgatgtctgatcactttggcctgtaattggtagatagtagagaatcgggaacctgatcagctataagggtgatctgatactgagggtggtaggttcttattgtactgacttagcagggttcttgctaaaactcaatatacaaaagtgtacacatgggcctaagaaaagtttaaggagcttgactatagttgagtaaagcaaagactctgtcaccatctggaattttgatagggattatgtttaatctatagaccaacttggagagtactgccatcttaaaaataatgttcagtattcttggtcaggtgtggtggttcatgactacaatcccagcactttgagaagccgagatgggcagatcacttgaggtcaggagttcgagaccagcctagccaacatggtgaaaccccatatctactaaaaatacaaaaattagttgggcatggtggcacatgcctgtaatcccagctactcgggagactgaggcaggagaactgcttgaacccagaggcagaggttacagtaagccgagattgcaccagtgcattccagcttgggcaacagagtaagactccctctcaaaaataataagtattctaatccatcaacatggggtgactttccattacttttcatctttatcaacattttgtggtattcagtatggaagtctcgcacatcttttatcagatttattcccaagtagtttattattttaatactataataaatggaattgttttcttttcttttcttttcttttcttttttttttttttttttggagatgaagtttcgctcttattgcccaggctggagtgcagtggtgccatctcagctcactgcaacctccacctcctgggttcaagcgattcttctgcctcagcctcctgagtagctgggactaccggcacgcgccaccacacccagctaatttttttttttgtatttttagtagagacggggtttcaccatgttggccaggctggtctcgagctcctgacctcaggcctcccaaagtgctgggattacaggcatgagccaccacgcccagccagaattgttttcttaatttcatttttggcttgtgccgtgatagtatacataaatacaactgagttttctatgttgatcttgttacctgtaaccttgttgaacttgtttatcagttttaatagtttagtggattccttaggatttcctacataaaaaatcacatcagtagataaacttctccattccattctggattcattttcctttccttgctcacttactttttaaattccaaatggatatggaatttttcatcttccctcacaatactttcctctctctcaaatgtagtatagtaattagttgtgttgaaaacattcctgataataagccattcttgcaatcctaaagtaaaactgttcatagggcactattttttctcataactggattagttttgctagaaattttatttagaagatttgcatacagatgagttttctttaaaatatcattacctaggactaatttaatcttactaagtaccactaaatcttgtcttatcatatttgagtagatgcattcacttatttgattcttacagtaccaaatcaggcagcttattataaaattcatccacagtttacagaagatcagactgagatggccaggcgtggtggctcacgcctgtaatcccagcactttgggaggccgaggcagacagatcacgaggtcaggagatcgagaccatcctggctaacacggtgaaaccccgtctctactaaaaatacaaaaaattagccgggcacggtggcgggcgccgtagtcccagctactcaggaggctgaggcaggagaatggcgcgaacccgggaggcggagcttgcagtgagccaagatcagccactgcaccccagcctgggcaaaagagccagactctgtctcaaaaaaaaaaaaaaggaagatcagactgaggcaagagaggccatttaacttctacaaaattacgtagccagcaagaggcagagccaagacgtgtactctagcagtctgactctattctgtacttcactttgctctataaccagtacagctttaaaagtttcctcaccttttcaaatgtgttgacctctgtgaaatgctctgagatatttcttttcttttctttttttttttttttttttgagacagagtctactccatcaccaaagctggagtggcacaatttcagctcaatgcaacctccgcctcctgggttcaagtgattactgtgcctcagcctcccaagtaactggaattacaggcgtgcatcaccatgcagggctaatttttgtatttttagtggagacagggtttcaccatgttgcccaggctggtctctaactcctgaactcaaagtgatccgcttgcctcagcctcccaatgtgctgggattatagacataagccaccatacctggcctgagatatttattttcatgcccacctggctgaaattagtatatatttggaggaccaactccccttacctaaaattaatgtttcagtatttcaacccctatccttttctcttgttttctcttcattaagagaaaagtctcagccacatgtgtggctcacgcctgtaatcccatcactttgggaggccaaggcaggtggatcacgaggtcaggagatcgagaccatcctggctaacacggtgaaaccccgtctctactaaaaatacaaaaaattagccgggtgtggtggcacacgcctgtaatcccagctacttgggaagctgaggcaggagaatcgcgtgaacccaggaggtggaggctgcagtgagctgagactgtgccactgcactccagcctgggcaacagggcgagactctcaaaaaaaaaaaaaaaaaggagatataagtcccttaaggaggccaggcgcagtggctcatgcctgtaatcccagcactttgggaggctgaggcaggcagatcacaaggtcaggagatcgagaccatcctggctaagacggtgaaaccccatctctactaaaaatacaaaaaaaaacttagtcgggcgtgttggtgggtgcctgtagtcccagctactcggaaggctgaggcaggagaatggtgtgaacccgggaggcagagcttgcagtgagccgagattgcgccactgaactccagcctgggagacagaacaagactccgtctcaaaaaaaaaaaaaaaaaaaaaaaagtcccttaaggagaccacaaggatatgaaagaggcatgtgaatccaggcctacgcacagttccactacatgaatacatggaagccattccacattttgaatcaccatgcacacacacagagaaacgcgcagaatcaccatgcacacacacagagaaacgcgcacacacacacagttcctgtgcgtgcagatggtgtgacctgggagcttgagcagctggctgcacgcaggtaacaaacaaactaagagggcagaagtctaagaaagtatttcacatagccatccaaagaaactttaaggtgttccttttctctcagcccttaaaaaatgtcatttaatttgctctttgcctttatggtggtgtgtttttttgtttttttgttttttgttttttgagacagaggctcactctgtcacccaggctggagtgcagtggcgtgatctcggctcactgtaacctccacctcccaggttcaagtgattcttgtgcccagcctccccagtagctagtattatagatgtgtgccaccacgcccagctcatttttgtatttttagtagagacagggttttgccatattggccaggctggtcttgaattcctgacttcaagtgatctgcccacctcagcctccaaaagtgctgggattacagatgtgagccattggtgggtttttttgcttgttgttttgagacagggtcttgctgtcacccaggctggatgacagtgatgtaatcatagctcactgcagccttgaactccagggctcaagtgatccaccttggcctcccaaagtgctggcattacagggcatgagtaaccatgcccaggcctttatagtttctataagaaatccacagtcggccaggagtggtggctcatgcctataatcccaggccaaggcggattgattatgaggccaggagttcgagaccagcctggcgaacatagtgaaaccctgtctttactaaaaatacaaaaaattatatgggtgcggtggcaggcacctgaatcccagctactcggggggctgaggcaggagaatcgcttgaatccgggaggtggaggttgcagtgaaccgagattgtgctattgcactgcagcctggagtgtgagactccatctcagaaagaaagaaagagagaagggggggagaagaaagaaagaaacaaagagaaaagaacgaggaaagaaaaagaaagagaagaaggaagggaagaaaggaaagagaaaagaaaaaaaaaaaggaaggagaaggaagggagaaaggaaggaaggaaaaaagaaagaagagaagagagagggaaaggaggaaaggaaaggaggggaaagaagggagggaaggaaaaagaaatccacagtcaactgaactgttcttttatttatttactttgagacagggtctcaaagtactacaggcacatgcaaccacacccagctaatttttttgtaggggtgggatttttccatgttgcctagacgggtctcgaactcctgggctcaagtgatctgcctgccttaccctcccaaagtattgttgggatttataggcatgagccacgaaatgttctcttataagtaacatgttattacttcccaggctaatttcaagatgttctacttatctttagctttcacaactttaattattatatgttttggcttatatttctttggggttatgttttgggttcattaaatttcttgaatctgaatatttgtgtctttcatcaaatttgagaagtttttcatcattaccttttcaaaaacttactgcatcacacatcttcttcttcttttaggactctaatatcatgaatgttagccttttgtactgttacacagccctgtgaggctctgctgctagtatgctgaatagtttgggtttatattcagggcactttgaatattataacactctgggcctttaagtcctatggagaacgtagattttttttttttttttttggatggagtctagctctgtcgccaggctggagtgcagtggtgtgatcgtggctcactgcaacctccgcctcccgattcaaccgattctcctgcctcagcctccttagtagctgggattacaggcatgtactgccacgcccagctgatttttgtatttttagtagagacggggtttgaccatgttggccaggatggtctcgatctcttgacctcgtggtccactcgcctcggcctcccaaagtgcagggattaaaggcatgagccactgcactcagctgatttttttttttaatctggacaattacccagttgggttcagcttgcaagttttagtcaacgctctgagttgtggtttcaatgagagctttattttcaaagattttgttgtatgctttgtgtctctacctggaggctagactacacagaaggtcatctatctcacattccagctctcaaagtctatggtatgtctcattgccaccacaggattgcttggaggctggaaccaagtaaatggagaaaacaaactgaggtattaatctccctctctttctcactgagcattagaaaccacccctcccacccccttgttgatattaccagaaccagagggcttcttctggaactctccatgttggtcatgatgtgtgcctctggtttttcagccacactgagtacagaccagatgaaaccagaaggggtaaaactagtaaacttactgcctgcttggtggtactttgaacgctgatttttttttccatctccctgctgctatttacttttcagattcttcaaatagctgatgcattctgtccaggtgggacattcagtgggacagacaggataactgcatttactccacctttccctaaaccagaaccaattttgccaagtcatacacacacacacacacacacacacacacacacacacacacacataaaatataggatgcattctcttgttacttctggtttctttcacaacatcatgtttgtgagattcatccacgttagggggtttacctgtatagtaggcagaattctgagatggtgcttatgagtcctgcactctggtatgccttggtataatcccctcctgttgagtgttggtaggataaacagtttcctcctaatcaagaaaatatagcaaaagtgatgcaatgtcagtcaactgtattacattatgtggcaacaatgaaggaattttccagatacaattcaagtccctattcagtcgattacacattacacaaagcgaataatctcctagaatattcctaggagaacttgatttacttatagtatagagatatctagagatattcacctgacaaaattagatgagtcccttcaaaggggatttggatatcagtgactaaaaaatagcagacagctggatgccatggctcacacttgcactttgggaggccgaggtgggcagatcacaaggtcaggagttcgagaccagcctggccaatatggtgaaaccccatctctagataaaaatacaaaaattagctgggcatggtggcgcgtgcctatagtcccagctactcgagaggctgaggcaggagaatcgcttgaacctgggaggcggaggttgcagtgggccaagatcacgccactgcattccagccagggcaacagagcgagactccgtcacaaaaaaaaaaaaaaaaaaaatagacatactctctgttgctggcattgacaaaataagctgtaaggaattctacagccataacaaaattaattctaccaacaatctgacacagattagaagcacattcttctatattttagccccaaccctctccagatgagaaggaaactgtaagaattctgccaccatgaaaaagctgaatgttgtgacaccaccaaagggtcactctcactctacagcaatggtccctttccaaaatggaggcacagagatgacaggtggagaattcaaagcttggcctacagggaagctcagctagatccaagacaagattgaaaatcaacacaaacataaagcaatcaacaaaataagaaataaacatcttaagaagtaattaatcaaagctacaggaactgaaaacctcacttaaggaattttaaaataaaattgaaagcttcatcaacagactacaccaagcagaagaatttcagagcttgaagactggtctttcaactaacccagtcagacaaacacaaagaaaaaaatgtaaggaacaaagtccccaagaaatatgggatgatgtaaagtgatcaaatttacaaataactggcattccagggagagaaagagaaaaagtaagcaacctggaaaccatacttgagagaataatttaagaaaatttccctaattgtgctagagaggtagccatccatatgtaagaaatccagacaacacctgccagatactacataaaatgaacaccacgaagacatacagtcaccagcctaaggtcaacgctagagaaaaaagcttaaaggcagctagaggaaatggcacatcaggtacaaagggaatctcgtcatcaggctaatagcagactcctcaggagaaaccctacaagccagaaaagactgggggcctattttcatcattcttgaagaggaaactcaaaccaagaatttcaaacctgaccaaactaagcttcataagagtagaataaacatttctagagacaagcaatcactaagggatttcattaccagtagaccagccttacaataaatccttaatggagtttttgtgtgtgcgtgtggcggggggtttgtttgtttgtttttcagacatttcactcttgttgcccaggctggagtgcaatgacacgatcttggctcatggtaacctctgcctcctgggttcaagtgattctcctgcctcagcctccggagtagctgggattacaggcatgcaccaccatgcctggcttttttttttttttttttttagtggagacagggtttctccatgttggtcaggctggtcttgaactcctgacctgaggtgtccaccctcctcagcctcccaaagtgctgagattacaagcatgagccacctcacttggccccttaacggagttctaaacatgaagacgaaagaatgatacctgctaccacaaaacaaccaaacctaagtacgcagcccacagaccttttgaagcaaaaacaaaatagaaactataaaacaaccacctaacagcttcataataggatcagatcctcacatatcaatattagccttgaatgtaaatggtcttaccaccccatttaaaagggacagagtggcaatctggataaaaacgacaagtactatccttctgagacctatctcacacatatgagacacccatggactcaaaaagtgggagaaagagctatcatgcaaatgcaaaacaaaaaagagcacggatcattattcttttgttggataaaatagactttaaaccaacaacaggaaaaaaggacaaagagcactatataatgataaagggttcaatccaacaagatgacttaaccttcaacattggagcattcgcattcataaaacaagtacttctagacctacaaacagacagccaaacaagaatagtggcagacttcaacaccccactggcagtgttagatcactgaggcagaaaactaacaaattctggacttcaatttgaaacttcaccaattggacttaatagatatccacagaacattctacccatcaaccacaaaatacatattcttctcgtctgcacacagaacactcaaagaccacattctcagccataaagcaagtctcaataaattcattcaaaatttgaaaatcataccaaccatactctcagaccacagtgaaatagaaataaaaataaagatcaataccaagatctgtcaaaatcacacaattacatggaaattgaacaacttgcttctgaatgacttttgggtaaacagctaaattaaggtggaaatttaaaaattctttgaaattaatgaaggcaaaaaaacaagataccaaaatctctgggatgcagctaaagcagggttaagagaaatgtttagagtgctaaaacacctacagcaaaaacttagaaagtcagcaccatatgaagtgaaaaaaacaaaaaaggaacatacctcaaaataatagagccatctatgacatagctgcagccaacatcatactaaatgggcaaaagctggaagcaccccacttaagaactgaaaaggctgggcacagtggctcatgcctgtaatcccagcactttggaaagtcaaggtgggtggatcacctgaggtgaggagttcgagaccatcctggctaacatggtgaaacctcgtttctgctcaaagtccaaaaattagccaggtgtgccagtctgtgcctgtaatcccagttacttgggaggctgaggcaggagaatcacttgaacccaggaggcggaggttgcagtgagccaagattgcgccattgcactgcactccagcttggacaacaagagcaaaactctgtctcaaaaaaaaaaaaaaaaaaaaaaaacaactgaaaaaaggccaggcacgatggcttgtgcccgtaatcccagcactttgggacactgaggcagctggatcatgaggtcaggagttcaagactagcctggccaagatggcgaaaccctgtctctattaaaaatacaaaaattagctggacgcagtggcaggcgcctgtaatctcaactactcggaaggctgaggcaggagaatcatttgaacccgggaggcggaggttgcagtgagccgagatcgcgctattgcactccagcctgggtgatagggcaagactttgtctcaaaaaaaaaaactgaaaaaagaaaaggatgcgcactctaaccactgctattcaacatagtactaggagtcccagccagaacaatcaaagaaataaaaggcacgcaaataggactatttgtcttcactgatgatatgagtctgtacatagaaaactctataagactctgacaaaaggcccctggagctgataaacaacttcagaatttagaaaactcaattcagttctggatacaaaatcaatgtataaaaatcagcatttatttgtttgtttatttatttttaaagatacagtctcgctgttgcccaggctggagtgcagtggcacgatctcggctcactgcaacctctgcacatcagcctcccgagtatctgggattacaggcatgcagcaccatatccagataatttttatatttttagtagagacagggtttcaccatgttgcccaggctggtcttgaacccctgcctccaagtgaccagtctgcctcagcctcccaaagtgctgggattacaggcatgagccaccacaccaaatcaccatttctgtacaccaatagtgttcaagctgagagccaaatcaagatgcaatctcatttacaataaccacaaaataaaatacctaggaatacatctaaccaaggaggttaaagtttctgcaagaagaactacaaaacaacactgctgaaaaacaatggaaaaacaccccatggtcatggacaggaagaatcagtatcattaaaatggccatagtgcctaaagcaatctgcagattcaacactattcctatcaaactctcaatgtcatttttcaaagaattagaaaaaaaaactattctaaaatttatacagaactgaaaaagagcccaaatagccaaagcaatcctatgcaaaaagaacaaaaccagagacgtcaccctacctgattccaaactacactacaagcctacagtaaccaaaatagcatggtactgttacaaaaacagacacatacaccaatggatcaaggttaaaaaataaaagaagccacatacctacaaccatctgatctacaaagtagacaataacaagcaatagagaaagaattcccaactcaataaatggtactgggaataactggctagccatatgcagaagaataaaactggatccctacctttcaccatatacaaaaattcaggatggattaaagacttaaatgtaaaacctaaaactgtaacaatccttgaagaaaacttaggaaataccattctgggtatcagccttagcaaagaatctgtgaataagtccccaaaagcaactgcaataaaaacaaaaattgataagtaggacctaatttaactaaatagcttctgtacagcaaaagaaactatcaagagagttagacaacctacaaaagaaaatattttcaaattatgcatctgacaaaggtctaatatccagaatctataagaaacttaattcaacaagcaaaaaacaaatcccattaaaaaatgggcaaatggtttggcgcagtgtctcacacctgtaaccccagcactttgggaggtcaagtaaggaggataacttgagttcaggagttcgagaccagcctggccagcatggtgaaacccccatctctaccaaaaatacaaaaattagctgggcatggtggcgaacatctgtaatcccagctactcatgaggctgaggcaggagaatcgcttgaatccaagaggcggaggttgcagtgagctgagattgtgccactgcgctccagcctgggtgacacagtgagactccatgtaagccaaaaaaaaaagtggggggcagggcaaaagaacataaacaggcagttctcaaaagaagacatacatgcagccaataaacataggaaaaaatgctcattactaatcattagagaaatgcaaatcaaaaccacaatgagataccatctcaaaccagtcataatggctactatttaaaagtcaaaaaacatgttggccaggatgcagagaaaagggaacatttgtatacactgttggttggaatgtactgtggaaaggagtgtggagacttctcaaaagaacttataacaaagctaccactctaaccagcaatgccattaccgggtatatacccaaaagaaaatagatttttctatcaaatagacacatacactcatatattcatcacagcaatattcacaatggcaaagacatggaatcaacctaaatgccaatcaacagtggaatggataaagaaaacgtagtacatatacaccatggaatactacgcagccataaaaaagaacaagatcatatccactgcagcaacatggttgaagttggaggtgatcatcctaaacagattaacacaggaacagaaacctaaatactacatgttctcatttgtgagagctaagcgagtaatcatggatacaacgatgggaacaatagacactggagactactgggcgggtaggtgggaggctgggggaagaggagagagttgaaaaactacctacaggatactatgcttaccacttgggtgatggatcattcatatcacaaaccccagcaatacacaatttacccatgttacaaacatgcacatgtatgccctgaacctaaaggtgagaaaaaataatgtactacaatggaagcaaaaattaaaaatagaaactaacaaaatagaacactatagactgaactgtgtatacactcttccccgcacaatgttcatatcttcgaatcccaactcctaaggtgtttatatttgaatatgggggcttctagaggtaattagggttggatgagatcatgatgatggggctctcatgatagtattagtaccttataaagaagagacacaagagtgtttgctgtatctgtcagccaaaggtgagccagcagaatgagagataatgagaaagcagcactctacaagccaagaagatgccctcaccaaaaaccaaccatgttggcaccctgaagacatttacagcctccatagcactgagaaaattaatttctgttgcttaagccatcctgtgataatttgttatgtcaacacaacttttctacagaaatcaaaccaaaaatatactaatcaaatccatttattttgaaaggaattaacaaaactaagtaaattctagcaacattaatgtttttcataaaggagaaaaggcacaaggaaatgatatcaggaatgaaaaggggtatgcaaaaggtatgcaacagcaaaaggcacaaatacttaaaatatcagaaaatataaacattgagtataaattttaaaatacaaaactacctataaaaacaactcttgccaaaacagacttaagatgaaattggaaaataataaataaaaactttaaaaagatgaaattggaaaccttactagtgcctacaaaatataaaaataattgagtccatgctttgaattcattccaaaacatgaaaataaaatcccataacaatggcaacaaataatccagattcagctgattctgccagtgaattgtgactgataatacttgtaataagaaagtactgtatgagttaaggaaaggagaaaatactccaaccttcatacaaaaaaacaggcaatgatagactaagaaaagaatattgcttggaacaggccccaagcctggacataaacaggccatgagaaactggccataaacaagatctctgcagcactgtgacatgctcgtgatggctatgatgcacacactggaggttgctggttcaccagaataagctcaaggaacacctagcccacccagggcggaaaacttctcaaggcattcctaaaccacaaacaatggcatgagcaatctgtgccttaaggacatgttcctgctgcagataacaagcaagagcctgtcccttggttctccataaataatacattcagttaatctataaactgcagaaacgatgtttatcatgagtttactgtcaataaatagttgggtcaaactctgtttgagaccgtcagctctgaaggtctcattgcacttctgatcccacattgcactctctttttgtgtctgtgtctttattcctctagcaccgctgggttgaggtctccatgaccaagctggtctcagcaagtggcgcccaaacatggggctcgaacccgggtcgaagggtcgccagagcgatggttggagaacatggaactacgctggagcacacctgagtactcttaagcaatccccatggtaagtaagaaggggagctcggaagcatcagggtaacaatgggacaagggtcaagcaggcacaaggcttatttgagtctgcctcggcagctcctcagaaaaggaggagtgaaagttagcactagctgacttatgcagctttttagtatggtagagaaatattgcccctggtttccgactgaggaaatatggatgtagaggtctgggaggaggtaggcagcgcactgaaaaaggcgtataaggatggtgctgaggatattcctataactgtctggtcagtgtgggctctgattcattccaccttggaagcttttcacactgatgatgaggaggaaggagacaaagaagagagggagtgtgataatgttgcagaagagataaaagaacagatccgtcaaccacttaaagagacccaagaaggggaagcttgtccctgcccctcagcacctcctcaataccttgaagatagggaatggcctgaccctctggatctttcttttctggaggacactgagcaaaaagtagtctccccagcaactgttcgagcagagccccgagtgaccgccctcagttctattcaggcaggaattcagcaagctagaagagagggtaatttagaggcttggaagttccctgttaggatacaccccccagatcaacaggggaatgttatggctacatttgaggcttttccctttaaattactgaatgagtttaaacaggctatcaatcagtatggaccacgttctcctttcgtgatgggtctgtcaaaaaatgttgctacctccagtcagatgattcccattgatgggacactcttactcgagcctgtctggctcctgctcagtttttacagtttaagacctggtggccagatgaagcttctattcaagctgcctgcagtgcacaaattcaacctccaattaatgtaactaccgaccaacttttgagagttggtggctgggctgcattagacgcacaagtggtcatgcaggatgatgttatagatcagcttagaggagtgtgcattagagcttgggaaaaaaatctcttcaggtggagaacaatacccttattttagtgctgttaagcaggggccaaaagaaccctatgcagattttatagcttggttacaggagtctcttaaaaaggtgattgcagattcaactgctcaggatatagtgttgcagttattagcttttgacaatgctaatcccaagtgccaggctgctctgtgacctgttagagggaaagcacatttagttgattatatcaaggcctgtgacagtattggaggtaatctgcataaagctactctgttaatgcaagccatgggaggactgagagtgggtaaaggaaatgctccatttcctgaagcttgtttcaactgcaggaaacatgggcatacgagagagaatgtagaaaaaatcagagggtccaactacccattgatggaaaaaagaaaactgctgaaccaggtctatacctgaagtgtaaaaaaggaaagcactgggccaatcagtgtcattctaaatttgataaagacggaaacccgatttcgagaaacgccatgaggggccaatcctgagccacattccaaaccagggcattcctggctcagaccactccctcacccctgtataatgcttgtcccccgccacagctggtagtgcctcagtagatctgtgttgcaccagggctgtgagtctcctgcctggaaagccactgcagaaggtaccaacaggagtctgcggacctctgccagcaggaatggtaggactacttctgggaagatctagtttaaatttaaaaggagtgcaggttcatacaggagtaattgatttggattgtaacggggaaattcaaatcgttatatctacctctgttccttaaaaggcagaaccgggagagcgtatagggcagcttctgattttaccgtatgtgggactaggaaaaagtgaaactaaaagaacaaggggatttggcagtacaaataaacaagggagagccacctactgggtaaatcaaattactgataaccatcctacctgtgaaaaaactattcagcgaaagaaatttaaaggtttggtagatacaggagtggacatttcaatcatatctctacatcactggccgtctgcatggccaattcagcctgctcaatttaacatagttggagttgataaagcccctgaagtatatcaaagtagttatactttgcattgtaaagggcccgatggacaacctgggactattcaaccaattataacttctatacctataaatttatgggggctctccccccatacatttattacaacaatggggagcacaagttctaattcctgagcaattatacagccctcaaagtcaacatatgatgcatgaaatggggtatgtccatggtatggaactaggaaaaaatttgcaaggtttgaaggaatctcttcaagcggaaagacaaagttcccgccaagacttaggataccatttttgatggtaagcctgcagagcctatcctgttaaaatggctgacagacaggccaatatggatagaacagtggccgctgagtaaagagaaactggaggctttaaatgaactagtcaaagaacagcttcaaaaggaacatatagctcaaactctctccccttggaattccccagttttcgtaattaagacaaaaccaggtaaatggagaatgttaactgacttaagggctattaattcagctatataacctattggggcattacagccaggactgccttctcctgctatgattccaaaaaattggcctttaatagccatagatttaaaagacttgtttctttactatccccttagctcagcaggactgtgaacagtttgcaattacgattcctgtggtaaacaacttgcaggctgctaagcgttttaattggaaagtgttgcacaaggcatgttaaacagtccaacaatttgccagacttatgtagggcaagcaattgaacctactcataaaagattttcacagtgttacattattcatcatatggatgatattctttgtgcttcccccactccggaaatattactccaatgttacggtcacttggagaattcaatttctcatgccagtttaattatagctcctgacgcaattcagactactactccttacgtctacttgggggccttagtaaatgtcaccacaataatgccacagaaagtagccatatgtaggatcaatagaaaacattgaatcagactttcaaaatttactagggtatattaattggataccgcctgctctaggcattctgacttatgccatgagtactctgttttctatctttagaggagatcctagtgtcacaagcccttggcaattaacaaaagaagctgaggcagagctgcagctaattgaaaagcaagtccataaggcccaaataaatagaatagatctagagaatactctagatttgctcatttttccaactcagcattcacctactggtgttattgttcaagagcgagatcttgtggcgtagcttttccttccatatactaattcacggactttgactccttatttggatcgaattgctactatgataggaaatgggagaactcggattgttaaattacacggatatgatcctggaaaaattattatccctctcacaaagacacaaatacagcaagcttttataaatagtcttacttgttaaacccatttagctgactttgtgggtattctcaataaccattttcctaacatgaaactgtttcaattttttgaaattaactaattggattctccctaaaatgactaaatcaaaccaattgaaggtactgagaatgtcttcgcagatgggtctagtaatggtaaagcctcttattctggattgaaaggtaaagtttttcagacgccctatacttcagctcaaaaagcggagcttgaggctgtaattgaggcattgactgcttttaatatgcctattaatatgatttctgattcttcatatgtggttctacacagttagttgaaaatgctcagctacaattccacacataagagcaactgatgactttatttacccaattgcaaacagcagttaggagtagaatgcaccctttttacatcactcacattagggctcatacacctcttccaggacctttgactgtagggaatcaaatggctgatcacctagttgctactgcaatatctaatgctagacaattccacaatttaacacacgttaatgtctctggtctcagacacagatacagcattacctggaaagaagctaaagctattaaccagcgatgcccaacttgccaaatgattccttgaggattggaacctaattctctttggcaaatggatgtcacacatgttccctcgtttgggagactagcttatgtacatgtatgtgtagacaccttttctcactttgtctgggctacatgccaatcaggagagtcttctgcctgtgttaaacatcaccttttgcagtgttttgtggtgatgggcattccagcttctattaaaacagataatgccccaagctatactagccaagctctagctacatttttctctatatggaatattgaagacattactggtatcccatataattctcaaggacaagctatagtggaaagaatgaatctctccctaaaacagcagttgcaaaaacagaaagggggagacagtgactataggactccacacatgcaactaaatctagcattattaactttaaattttttgagcctgcctaaaggccgattgttatcagcagctgaaaaacatttacagaagacagctgcaaaggcagaagtggaacaatgggtttggtggaaaggacccaataacaaaagattgggaaacaggtaaaataataacatggggcagaggttatgcttgtgtttctaaaggactgaatcaacagccaatttgggtgccattgagacatctaaagccctactatgttggggtgatcagactgaacactaggccatgggggctacgaagtatggcagagtcaaaggaatgagacaagttaagagttcatagggtgggtccagggggccaacactagtatggaggctgcgaagtccctgagctctgggagcccacactatttattggtgatcaaagaagcaggtggtgaggacgtgtggacatgggggtagacaggtgaggatgtgggggtagaaaggtagctgtgatggtttagcatatgctctgctacttgagataatggagaataggttcttctaactcaagatacaatcaatttatgagccacaaggggttttatgccctgggcttagactgtagtgcagcggggcagccttccatccttaggcacagagcttggtgttccataggccacaaggggttttagacccgggacccaggacatgttccaagactcttttacattatgtcagacaagcaggccctgcctcagcccttctaccgacacagaaagtggaacaacgggtttggtggaaagacccgataacaaaaggttgtgaaacaggtaaaataataacatggggcagaggttatgcttgtgtttctccaggacagaatcaacagccaatttgggtgccatcgagatatctaaagccctactatgagccagataacgaggaagaggttttgggaggatcccaaacacccactggtggcagcattgtccaagttgatgctgaggatgacccccaactgtcacgagcaacactcatcgaaagcagccacctacctggggacagatcaagaagctgtcacagatggtggaagaaaacctgaggaaagcaggacaagcagtcacagtgagtaattttatgacagcggtgatcaccattgccatgagtattccttcagcaaggactgacaaaaagagcaattatactcattgggcatatttaccttttccaccacttctatggcctgtaacttggctggaccccccagtggaggtatacactaataatagctcttggatgcctggtcctacagatgatagaggcccatctcacccacacagggaaggaactgttatgagtatttctttaggatttaagcatccgcccatctgtttgggaaaggccactagttgcccaccccctcagtatcaatcttggctggcaataatgcctggacgtaatcactctatggcagttacacatgctttctggtgtcagtatttaccataatgaatctgctcctctaattgaggcataccgccctcaaaaacctatttgtaaacaggattggacccggtcagaaaaaatgaatgtactcatttgggaagattgcattgcaggacaggcagaggtgctgcatgattcctatggaatcattattgattggtcccctaaggggatgtttagcatgaattgcacctctgtctgcatgtgatggccacactatgttcagctggtctgaataaaacgatcagatggtaaaaatgataagaagtaccgcaagagttcctattatctggaaacatgacggtatagtggcacctcaacctcaaatgatatggcccgctgtaggagctaaacataaggatttgtggaaactattaatagcttttgataagatcaagatttgggaaggaaaatatactatgccatcacaatataatcctaattacattttagaacttgttgaaaataatacaatttggatacaaagttgtgttcaccctccttttgttggtaatgggcgatctaaagtttgacacccctaattatcatgtaacttgccaggaaggtagattgtcctcttgtgtgaactcttccttgtttaatactaatcattctatactagcagtgagagctcaagaaggagttggttaccggcgaagctttcccatccttgggaaccctctccctctgtacatattattactaaattcttcagaaaattctaagaagttctcagtgtttcattgctactttaatcttgattattatgggactgattgctgtcacagctactgctgcagtagctggagtggcactacattcatcagtgcagacagcagattttgtaaataatggcaaaagaattctactctgctgtggaactctcaaactaaaatagaccaaaagatagttaatcaaatcaatgatctccaaccaactgtaatgtgggtgggagatcaagtagctagtttggaatatggaatgcagctgaaatgcgactggaatacttctgacttttgtatcactcctcacccttataatgaattagaccatgaatgggaaagaataaaaaaaagtatctggaaggacactctacaaacttgtcttcggatgttgcaaaattaagagaacaaatatttcaagcatcccaggcacacctgaccttaatgccaggaactggagtgcttgaaggagttgcagatggattggcagccataaatcctatgaaatgcataaaaacacttggaggctctgtgatttctatgatggttgtgctattaatctgtgttgtttgtctttgtgtagtctgcagatgcggatcctgactcctgcaagaagtagctcactgtgataaagccgcctttgcttttattgccctggtaaaacaaaaagggggacatgctgggaataggccccaagcctggccataaacaagccataagaaaagtcataaacaagatctctgcagcactgtgacatgctcgtgatggttatgatgcacacactggaggttgctggttcaccagaatgagggcaaggaacacctggcccacccagggcggaaaactgctcaaggtgttcctaaaccacaaacaatggcataagcaatctgtgccttaatgacatgctcctgctgcagataacaagccagagcctgtccctttgttctccttaaagaatactttcagttaatctacaaactacagaaacgatgtttatcacaggctgtcaataaataggtgggtcaaactctgttcgaggctctcagctctgaaggctgttagccccctgatcccactttgcactctatttctgtctatgtctttattcctctagtgctgctggattgtggtctccatgaccgacctggtcttggcaaatattacatgccaatgttaataatatttttaaaaaatctttacactataggtatataaaatattctagcaaaaaaaaaagttaatccattatactcaaactgcatttttctggaattacaaagataatataacattggaatgtcaatcagttatctttccacattttaaaaaaacttttatttacttacacatttaaatattaggtatctatcaagggcaagtacagtcagtcctaggtacctgaattttctgagtaaggcaagatcatcaaagaggaatcagggaaaagcattcaataaattcttaagccattcatgggaaagattccctaagcaatgaaaagtagaaaaaaaccttgaccttttaaaaatctacagcaaccaatacagtgattagtaatgatggaaaacatctgccattaggattagaaataaaagtatgcttgttttactacttctagttattattctagtattttctgcctagacaagacataaatgactgaaggttacaagttaagtcagttacagataatatgaaatgtggaaaacccaaaatacataaaactaggatgttaaagaatgttgaacaaggcttctagtaaaattcagtatacaaagatcaagtgattttatataaacaatcagaaatcagcttctaaaaaaaataaaaaaggaaatcagcttctgaagctaggcaatttctaggctgtgagactagggtatcatttcttagtgatacatcactattagtccaagcaccaggatgaggccaacctacagtattgacctcacctgtgacccacaagtgctcatactccaacaactgtgaaaaagtttcaggaataacctataggttttatttgagacaatcaggatggcatctaaggacagtctgtgaggtgacagaagtcacacaaggcaattaagactaatctgcgtcttttgtgtcactggtaacagttaaacgcaacaaagatgggttaaaataatcacactcataccacaagagaaccactctgaaaccctttcctctccataagaaaacatgtaacatgaaaatgcatggacctcaattcagtttttttggttttgttttgtttttgagacaaggcctctgtcacccaggttggagtccaatggcacgatctgagctcactgcagccatgacctccctggggtcagtgagacacctatctcagcctcctgagtaggttggactacaggcacgtgccatcacaccaggctaatctttacattttttgtagagatagggttttgccatgttgcccgggctggtcttgaactcctgagcccaagtgatccgcctgacttggcctcccgaagtgctgggattacaggcataagctattacacccagctgattcaggattggtaaacttacctgaagctttggattaccattacactggctggattaagaaccacagaaagaatcaccaagaaacaacagccttaattgctgtacatgatataacagaaatatttaaatttgtaccactcagactggaacctggttatgcagcttgtgcgtgtgtgtgtattccagggccatgttcaggaagtgctagtgatggtgtcaagcacagcagaatatcatgatcatccatgttcacaggagtttttctgttttcatagcacatgggcaaaatgaaaccccagaaataggtcatactgccaatcatagcagttaactgagtcaggcatatatgactgctttgccaaacagtggcatcaaagacaacattcgtggttcccaccacctctctgcactgcctgatagtacaagagttcccacctctccaggtgaagggttatgggtgtccctccacggccatgaaatcacggtatcttaagttactatctgttagtgcaccctttctccactcagacccttcttcaaccctgaccatttatctgaaaagatcaggtttgaaaagaggaacaagagtatttttacattttaaagctgtattataacttttaccttggccagtgtgagccactacaggtggaccatgtctaaaaatatgacaaaccaaaaagagaatctacactgttaaaacaggattgtctgaatcctgaaggcccactttaggtcagttgtaacccagaggatgtatagcaactagagtggtgttgctataggagaaagacataccatgccaggaatgagcagcggggtgtaagaaacttccaaaatagttctatagaaccacccagaaagccaggctttgacaggtttcagagaagcaatcctgatattccatacatgcccagtttctcataagtgtgaatgcccctcatattcactaaaggacgaagaatataaaaaattactttccaacatttattaccttcatgaagtttttctccactataaaattacaggtaaacaccaaagtatttggcaagaataaaacttctgaacatatcttacatcaaacatcttacataaaaagggtttatctccattccaagaacccaaggaaacagtgaaagctattgattttttttttttttttttttgagatggagtctcgctcagtcgccaggctggagtgcagtggcatgatcttggctaactgtaacctctgcctccctggttgaagcgactctcctgcctcaggctcttgagtagctgggattacaggggtgtaccaccatgcccagctaatttttgtatttttagtagagacagggtttcaccatgttggcctggatggcctggatagtctcgatctcttgacctcgtgatccacctgcctcagccttccaaagtgctgagattataggcatgagccactgcgcctggccagctctctatgtttctaacattgtacagcttcaggatgaactcttacacagtgtattgtcagcagattccaacggttctcccacatgcctttaactttatggagcatcatcagagtgtaagttctttcctatctttgaagtgaacagggacaaatgagcactttgacacagtgcttacattgttttctcaccagtgtgaattacaatgtgactattaaggcatatggacttccaaaaggattttcctcattccttacataaaatgggtttcttggccaggcgcgatggctcacacctgtaattctaccactttgggaggccaaggcgggcagattacctgaggtcaggacttcaagaccagcttggccaaaatgttgaaaccccgtctctactaaaaatacaaaaaatcagccaggtgcagtggtgtgtgcctataatcccagctactcgggaggctgaggcaggagaatcgcttgaacccaggaggcggaggttgcagtgagccgagatcatgctactgcactccagcctgggctacagagtgggacttcatctcaaaaacaaacaaacaaaaaaacatggtttctctccatggtgtttctacacgttcagtaagatgagaagaatgccaggtgcagtggcacacacctgtaatcccagcattttgggaggtggaagcacatgatcacatgaggtcaggagtttgagactagcttggccaacatggtgaaattctgtctctaccaaaaatataaaaaattagccaggtgtggtggtgcatgcctgtaatcccagctactcaggagactaaagcaggagaattgcttgaacttgggaggcagaggttgcagtgagccaagatcatgccactgcactccagcctaggtgacagagtgagactcatcaaaaaaaaaaaaagagagagagaagaactagtgttttcctacatcccttacatttacagggtttctctacagtgtgagtttgtacatatctagaaagattcaactgttcaggctttctcacattccttacattgatagtgttactttctcctgtgaatttttacatgttcagttaggcttgaggaaacagcaaaggtttttccacattcttcacatccacagggcttctctctagtgtgttttcaaatgtgcaatacgagctgagaaagaagcaaaggctttcccacactggtcacattcaaagggtttctctcccatatgagttcttaaatgttgaatacgtcctgaggatgtacggaaggccttcccacattccttacatttatagggcttctctccagtgtgaattcgcacatgattagtaagatctgaatgacaagtgaaggctttcccacagtccttacatttatagggttttattttggtgagagtttttaagcgatcatgaaagcacatggaatttcgaaaggaatttccacatgcgttacattcagaggtcttctctgctgcatgagtttttaagtgttgagttagtacacaagacctactgtaagctttttcacatgcattacatttatagggtttatatccagtgtgagttcttaaatgatcaactagactggaggagacaacaaaggctttcccacagtccttatattcatagggcttatctccagtgtgtcttcgtaaatgtttagtaagatctgagcgttctgtgaaggcttttccacatttcttacattcatatggcttctctccactgtgtcttcgtaaatgtttagtaaggtatgagcgctcagtgaaggctttcccacatttcatacattcatagggtttctctccagcgtgtgttcgtaaatgtttggtaagatatgagcacttagtgaaagctttaccacatttcttacattgatagagtctctcttctgtgtgagttcgcatgtgaatacgaagacaggcagaagaggtaaatggtttcccacatttgtaacacttaaagggcttctcaccagtgtgagttctcaaatgagcaaaaagagatgagaaagaaacaaagactttcccacactggtcacaatcaaagcgtttctgtcctgtgttacttcttctatcttcaataacacctgaggatgtaccaaaggccttcccatattccttatgctcatatggcttctctccattatgaactctcaaatgtccaaaaagagatgggtaagaaataaaggctttcccacagtggtcacatttaaaggttttctctctggcgtgacatcttatatgttcaataaggcctgcagatgtaccaaaggctttaccacattccttacacccatagggcttctctccagtgtgagttcgtacatgttcaagaaagcctgacggcacagtgaaggttttgccacagtgcttacatttataaggttttatcccaatgtgggtttgcatgtgattattaaggtgggtagggtatctaaaatcttttccacattccttacattcataggggtttttaataatgtgtgtttcaacatttacagcatggcttgtggagtgagtaaatgcttccccacattgcttccattcattgagtttttctccactctgagttttcctgtgtgcttcaaggtatgactgataaatgaaggctttcccatagtcagtgccttcaaaggatttatcttgtgtacactttctctggacctgaacatttaaaatcaggcggaaagattttccatgcttactgaacacagaaactttccttatggtagaggttttattgtatagagaaaggaggtcttttgcatactgaatacattcagacgtgttgcctctattttgagtactcatgttggtcttaaggcatggatgtttacagaagacatcttcacattgcttacagtcatagagttcctctccattttggtttcttgcctgttaacacaggaatgaacaataaaggaagcattttagcagacttattaatagataccactcttctaagaaacatgataattattatttttgccacttttataacatgcatatagtttctaccttttggatttccttcaacttgaataatggaaccctactgtaagaatcctatgtcatctgctctaatcttggcaagattcctgtagcttttcatgaagttattttaaaaactcaaatgtctagttatacatgttggaatgaacattcatgggaagtcttaagtaccaagcttcacacaaggtatgggatctctctccagatatttctccccttgggtgaattgggtgaatgccacttctctcaaatatctatcatttctgctgatttcttttttttttttttttttttgagatggggttacgctctgttgcccaggctgtagtgtgcagtggcacgatctcagctcactgcaacctccacctcctgggttcaaacaattcttctgcctcagcctcacaagtagctgggactacaggtacacaccactatgcccagctaatttttgtatttttagtagagatggggtttcaccatattggccaggctggtctcgaactcctgacctcatgatccgcctgcctcagcctcccaaagtgctgggattagaggcatgagccaccgtgcctggccatttctgctgatttctataatgcaataccagtcttctctgaatgtgaaaaataagaaagttcttttgttaatcttaccaactgtatcccatttaatgtttttaaacaaaaattatcttgccaaagggctggccctttggttttcaggcacattttccattctgaaataaaagagaaaaatatacatgagagtttacacatgaaatggtaggttaaataaaaagcagatagatttgaacaatttatatatgtctaaaatttggcaatcatatggggtcaagttttagtaatttttaaaacaacttattctatgaaaattaaacatgatggttaacagaagcaatactaccagggaaggaaaagtcggaaaaattggaacaaaagcatacaataaatccataaacataaagaaggtcatttgttaggtaatagggaagtctggatagatgcaaagcaatggaggatgaaaagttaagatatcccaaaacatccaagtccagtggacagccttctgattcaaagggcatcttataaaacttcattgtgcttccaaacgtactgagaacttctcatggaccagggttgttcttcacaaacactcaccttggagaactcttggcagtgtgctcaactcttcctcttcctccagccaagagatcagactgggtttgaagagctggtaacctgtacacagggaaagatacaccaatggaagaggctcatgcaagaaatggcaaacttttccatgaaacagggactacgtttctaattaaagcagtgaaaagcacttaaattgcatatatcccatctttctgttctctgaagacactggttatctctgacctctgaaattcacattcaagcttaactcatttcctgtttgccccaagaaacaagcactagcagtgagctgcactttttctttctaaatggcaaatgttaaatacaaattctaaaaaccactaaaacctttattaaaatagaaactaatggaagctcaaagagagatcttgattctcctgggaaaactcccattccagtagttctgaactttagagtgaattactcatctgaatacagggccccaacagcagactttttgatttagtacatcgagtctgagaatgtacacatatctaagacagtgatggtgatgctactgacgcaaactaccatacaagattaaaacccattagtacaggaactgtctctgttatttcctattttactcattaaaaaaaattttttttcagtgtgtatatatcccactgtattcagatttgacatcactaatcctagaatacagtaagtacataatttgtatcttgttccagaataggctacaagggatgatgccagacttacctactgaggacaggttcttgtagttctccagcatcacatcactgtacaggtttctctgagctgggtccagtaaagtccactcttcctgggtgaactccacagccacactgtcaaaggttaccaggtcctaaaccatcagacacatgctgatttgagccaagcaacatctccaccaatgttggctgaagaatgaggaagggggacccaatccctgtacagggtactgagtgctcccactatctacaccccaaggttcagtggccctaggaactcttctatccacattcactcactgtcaatttcctccaataacatggctgtaacagaacctcttacacagaaacttatcaaccacaactagaccgggagctcatctcatttgattcctctctactgcaaaacactcctgagcacataacaaatacttgataaatgaggatatggataaattccttaagaaaagaacactttcataccccttaccatctgtcctagcacccagaaaaataaatatgcagttggcaccaggaaaatgaacactaattcataaatacaaaaatactgagataatttccagggtaattcctcaccaatatgagaggtatgactttctgggaaaaattcaactagggtctatatttgctttaaggaagaatacagacaggagtacctacaagaaaatgagtctttgttgatatcattactccaattttagaaggatacaactttcacactaagtttagatctccccaaattcatcattatcagagcatctctccagagacattgctccctcttgagtgaatgctattcctctcaattatcttttgtgcttattttctatattggaagtcccaatattctctgagtgtgaaaaataagaaataccctttcttaacattaccatttgtatcccattagaagtttgtattttccaaaactcctgctgcagtgctgaaacactggtttgatgttttattgcccagtctgaaacaaaaacataaactgaggttttttttttttttaaaaaaaaaggtaaaatgaaagagttaaaaattataggcctcattcatatttgtttttaaaataaacataagaaaaaagaaagctaaattgaacatttagactgtgtcaaaaaattggcaataatgagattaaagggtcaaaattttagctaatttgctacaaattgactcatttagatttaaaactaatgttaaacagaaagaatgttatcagaaaagtaggaaagatctgggccaaagccatatttcaaagcaaagaacttgaaaaacaaaatatatagtttcataagatcatagaaagttggagtagatggaaatttaaagagtatcaaaaattgaatattttctaacttctgagataaatggccttaaccttgtgagagaaggtgcatcttaaaaagttccctcagagggctgggtgtggtggcttacgcctgtaatcccagcactttgggaggctgaggtgggcggatcacaaggttaggagatgaagaccatcctggctaacacggtggaacaccatctctactaaaaatacaaaaaattagccgggcatgttggcaggcacctgtagtcccagctactcgggaggctgaggcaggagaatggcatgaacctgggaggcataggttgcggtgagccaagatcgtgccactgcactccagcctgggggacagagtgagactccgtctcaaaaaaaaaaaaaaaagttccctcattatgtttctgatggtttggatgttagttccctccaaatctcatatggaaatgcaacgccaaatactggaggtggggcctggtgggagatgtttggatcatgggggtgggtccttcatgaatggcttagtgacatactcggagtaataagtgagttcttgttctgaattcatgtgagacctggtagtttaaaacaggagtctccaactccggagccatggaccagaaccaggccacagcacaggaggtgagtggcaggagagcaagtgaagcttcatttgtatttatagctgctctccatcctaattgcctcctgagctccgcctcttgtcagatcagcggcagcacttgattctcataaaagagcaaaatctatcatgaactgtgcatgcgaaggatttagtttgcgcgctccttttgagaatctaatgcctgatgatctgtcactgtctcccatcacccccagatccccaaatgggaccatctggttacaggaaaacaacctcagggttcccattgattctacattatggtagaattgtataattatttcattacagtagagttatggtagagttgtataattatttccttatatattacaatgtaataatagtagaaataaagtgcacaataaatgtaatgcacctgaatcatcctgaaacaatatccctgagacctggtctgtggaaaaattgtcttccatgaaactggtccctgatgccaaaaaggctggggactgctggtttaaaacactatgacaccacccccaacttctcttttactccctttctcatcatgtaatttgtctgctcctcctttgccttctgccatgattgtaaggtttctgaggctctcacctgaagcagatgtcagaaccatgctttctgtagagcctgcagaatcgtgagccaaaataaacctattttcttaataaatcacccagtctcaggtatttctttcttgcaacacaagaacagactaacacagcttctaaacatactgaacttctcactgaccaaggttgttcttcacaaatactcaccttggagaactccttgctgcaaggttctcaactcttcttcttccaaccaagagatgacactgggtttaaagagctgaaatcctttacatgaagaaatgatacattaatggaagaggctcaggccaggcacagtggctcatgcctgtaatcccagcactttgggaggctgaagtgggtggattacctgaagtcaggagttcaagatcagcctaagatggtgaaacccccgtctctactaaaaatacaaaaattagctgggtgtgatggcgtgtgcctataatcccagctacttggggggctgagacagaagaattgcttgaacccaggaggcagaggttgcagtgagccgagatcatgccactgcactccatcctggacaacaagagcaaaattccatctcaaaaaaaaaaaaataatggaagaggctcatgcaagagatgataaactttacattatagaactatagttcttagagaaagcagtgaaattatttcaaatggactaaaactgaaaatatctcttatttctgtgcaccccaaaattggctctctgacctctgaaatgcaaattcatgcttatgtgcacatttacaaagcaataaccttttagtcacagaaataaggtatgttgtcaaactcctgaatgaagaaaaaaaagaaaaaaagtgaaacaaagagacccttgtatacttggagaatacaactacaccagtgattcttaatattatagtgcatcaaattgatgtggaaggatagttaacacacagatgacaatccaagtggagagtttctgattcagtaggtcaaaggcagagactaagactgtacatttctaagggagtaacagtgatgctgtcgaaactggaccacactttgaaaacgaccacagtaattaagacctattatggcagggacaacgtctctggtgaattcagtgttgaacaaaccaattctggaacacagcaagtacacaatgtatatctcttccctaagaggctgcataaaatgatggcagtcttacctactttggccacgttctcataattctccagcatcacatctctgtataagtttctctgaactgggtccagtaaaatccactcctcctgggtgaagtccacagctgtatcctcaaaggtcacggagtactaaaccatcacatacatgttgatttgagccaagtaacagattaaccagtgttcactgaagaatcagttaacagaccccaatgcctataaagagttgtgaggtctctcattatctacccaaagcttaataatcccaggtaaatctcaggtattcctctctctatccttgctctttcactacttaacaattccagttgtatggctttaatggcacatctcaatcatgaacttctcatcacaagcagactgtgagtgctttctcaacttatttccctctactaaaagatatcccagagtacactgcatcatatacttgataaacagcgatgaatgattagcctttttttttgggaagcagggtcttgctctgtcacgtaggctggactgcagtggtgtgatcatggctcactgcagccttgacttactgggctcaagtgatcgtcctgcctcagcctcctgagtagctaggactacagccatgcaccaccatgcctggcattttttttttttttttttttttttgtggagacaatgtctcagtatgttgcccaggctggtctcaaattcctaagatcaagcgataatgccactcacttctcagcctcccaaagtgctgagattacaagtgtgagccactgcacctggccaggattagcctttgagtaaaggatgctttcatcttcctttccatctgccagaccactcagcaaaataagaaatatatatctggcaccataagggacaaaattaattaacaattactgaaatgctgaaatgcttttcaaggattatcagtatgagaacctccactccctggggaaattcaacaagtgactcagtgcttgagtgagtctttatttacttaaagaagctctggagacacatctgcctagaaggaaatgtgtttacctggtgatgcaagtatgtcattttgtggaagtatacattttctgcatacctgataacaatttgtcaggcagtaagccatcttcctttctgcctctgtcttttcttcatgaaggcagattgggttcctagaaagacctggaaaagaaagaaggcataagagcccagacataatcacagttccaacattcgcatgcatggaagttattccaacctggttcgaaattctcttataattcatataaactcacataaatatacattacatccataaaatgccactgcacttctgtctaacctagagcaagaaaaaggaattgtgggccaagctgtcgtaagtaaaagtataatatcctcattgcacaggtaaagaaacttttttttttttttttggagatggagtttcactctgttgcccaggctggagtgcagtggcacgatctcggctcactgcaagctctgcctcctgggttcacgccattctcctgcctcagcctcctaagtagctgggactacaggcacctgccaccacgcccggctaattttttgtagttttagtagagatggggtttcaccgtgttacccaggatgttctccatctcctgacctcatgatccgcccaacttggcctcccaaagtgctgggattacaggcatgagccactgcacctagccaggtaaagaaacttaagacctgaggaatgtaagtctttttgtgcccatggtgatataactcacaaatgagattatgcagcacctcttctcaaagaacacacttaagggggctaacttacacaacaggcctctctggcacacttcaacaactcagaaaggaactactagtgtgaatactaaggcctagagccctggactatatattctgcatggggtactgatatggtgtggctctgtgtccccacccaaatctcatcttgaattgtgataatccccacatgtcaagggcagaaccagatggaggtgattggatcatgggggcagcttcccccatgctgttttcgtgataatgagtgagtctcacaagatctgatggtgggtttttttttgtttgtttttgtttttgaaacagagtcttgctctgtcacccaggctggagtgcaatggcgagatcttggctcactgcaacctctgcctcccgggttcaagcaattctcttgcctcagcctcctgagtagctgggattacaggcacgtgccaccagacctggctaacttttgtatttttagtagagacagggttccaccagttggtcaggctggtctcgaactcctgaccttgtgatccacctgccttggcctcccaaagtgctgggattacagatgtgagccaccgcgcccggccaatctgatggttttataagtatgtggcatttccccggcttgcacccaatctctctcctgccaccctgtgaagaggtgtcttctgccattgatgccaccctgtgaagaggtgccttctgccattgatgttaagtttcctgaggcctccccagtcatgtggaactgtgagttaattaaacctcttttctttataattatccagtcttatgtattttttcatagcagtgagaacagactaatatggttacctaaagcagatttttggaaaaacttaccatagggcaaatcctgtgaggctgacagtgaaatatgtctggacacagttttttgtgattccaaggacatatcagggtagcttataaatctaagtggataactggcaatctattcctctttatatagagtatctggactcatgtagacatcaatcattaatcaacaagcgttacttatcagtcatcaaataccatatattaaatctttactgctggtgatatgtgtaaaacccactagaaatagtatatgttctgtataaaatgagtattaataacaccaactgccatttactagggactgttatatgttagacattacatatatatacacatacatatgtgcatatacatatatacatatatatatgctcacttatctgaacaatatccctatttagtgctgaaaaaaatctaaattcagaaaacacaaatgactcttctaatatcatctacttaggaagcggtgaaccaggacttgaatgcagtcaagtttgtccctaagtctaatcctctgtggttgttattactcccccataatgactgccatataaaggactctgggaattgatacctggcttacttaaaatgtgctattctacttttgactataaagaattagaacaagaatgtcatcctttacaaacaagtcagaactcatttccaactctggttgcttcaacagggttccaagtagaacactgaagttagcgttcagagttctgcccattgctcctgcaagaggacaaaaaacatgcagagcagcaatcgcaaatcagactctgccccttatattgactatttgatgggtcttctcagaaaatcaccttttattattattcatgagttctctttttcctaaaatttctgcttgtatttttatcccttccttcctttatggttcttacaaatcaaatgaaaaacgcaattgagatcatcaacagtagagaaggaaaagaaaaaaatctttgaacttgaaaacagactacttagaaatacacaaaggagaaaaaacaaaaatgaagaaaaattacaagattcaagggacatcatcaaaagagcaaatttttgagttacaggagtacaagaagacaagaaagaaagagaacacatacttaaagaaacaataacaacatttccacactgaggaaaatatataaatatccatactcaggaagggcaaacatctccaatcacattcaatccaaacaaggctaccctaagatataatataatcaaacagtcaaaaatgaaaagcaaagtgaagatcttggaagcagcatgaaaaaagatgcaaatcacatatgaacgagttccaataaggttatgagcagacctgtcaccaaagaccttacaggccaggagagaatgggatgacatatataaactgctgtcaggaaaaacaaacaaacaaaaaaactgctcacaaagaataccatacccagcaaagctgtccttcaggaatgaaaaagagatgaagattttcaaagaaaaacaaaagcagaggtagttcatcgacaccagacctaataagaaatgctaaagggagttctcaagcttaaaaaaaggacactaattagtaacaagaaaacaaagcacaaaactcaggtaaaaataagcacgtagctaattcagaatactcaaacactgtaatggtggtttataaatgaattatatccttacgatgaaggttaagagataaaagtattaggaacagtaagagctaaaataattaagggatatacaatataaaaatatgtaaattacaatatcagaaaaataaaatgaggagaggttgagttaaagtatagttattttatgtgatcacagttatcggcttaaaatatcctgctataagatgtttcatataagtcttatggtaaccacaaagcaaaaatgtatagccaacacacaaaagataaaaagtaaagaatcaaaagtacactagagaaaattattaatcacaaaaatagacaaaggaagaaacaaagaatataaaaaaaaaccccacaaaacttaacgagccaggtgcagtgcctcatgccactaatccctgcactttgggaggtggaggcaggtggatcacttgaggccagaagttcaagactagccatggccaacatggcgaaaccttgcctctactaaaaatacaaaaattagccaggcatggtgacgggcacctgtaatcccagctattcaggaggctgaggcaggagaatcacttgaatgggcaggagaatcgcttgaacccagcagatgaagattgcagtgagccaagatcatgccactatactccagcctgggattttttttttccaaaatggaaaaaaaaaaagaaagaaaactattaacaaaatggcagtagtaagtacctacctacaatgattactctgaatgcacacacactaaattctccaattcaaagacagaatggccaagtggattaaaaaaacaaacaaagacacaaatgatcatgttgtttacaagagactcacttcatccttaaggacatacataaattaaaaacaaaagggcaggggaaaaaacactccacacagatagaaaccaaaagacagctaagttaagtattacttatatcagacaaagtgaactttaagtcaaaaaccgtaacaggacacaaaggtcgttatatgataataaaggaatctaccaatcaataagatagaataattataaatatacaattggccatctgaattcatgagtaccacatctccacttattagggtagattcaacctgccatggattgaaaatatccagaaaaaaaaaatgcatgggtccaactttattatatatgtgcacatattttccctgctcattattccccaaataatacagcaaaacaactatttacatagcatttactttaagttttacagtaatctaaagatattttaaagtacatgagaggatgtgcatgattttcaaacaaatacaacatcattttataagagacttgaacatgcctaaattttggtatccacaggtgggggaggggttataggaaggggggttatcctgaaacaaatcccccacagattccaaaggatgactacatatgccaacaacaacagagcacgtaaacatataaagcaaattaataatagatctgaagacagagatagattgcaataaaataatgggagactttaataccctactttgaacaacggacagatcattcagacagaaaatcaataaagaaacatgagactagaactacactttagaccaaaacaatctaacaacatacacagaacattccatccaacagcagcaaaatacacattcttctcaagtgcacacagaacattatccaagatagatcatatgttaggtcacaaaacaacaacaacaacaacaaagcaagtcttaacaaatttaagaagcttaaaatcatatcaaacatcttttctgactacagctgtaagaaaatagaaatcaacaataggaagaaaattagaaaattcacaaataggtggaaatgaagtaacacacacctgaacaagcaaaggatttaaagagggcagttaatagcaataaatgcctatatgaaaaaagaaaatcacaagtaaacaccctaacactgcaccttgaggacttagaagaacaacaagaactaagctgaaagttagtagaaggaaggaaataataaagaccagaactgaaataaatgaaactaaaaaaaaatcacaaaagataaaggaaactaaaagttttctgaaaagatgaacaaacctttagatagatcaaggggtgaagagaaaaaaaaaaagccgggcacagtggttcacaactgtaattgcagcactttgggaggctgagttaaaaggatcaactgagcccaggagttcaaggccagcctgagcaacatagcaaggtcctcatctgtacaaaaaaatgctttcaaaaatagctgggactgggcatggtggctcacacctgtaatctcagcattttgggaggccaaggtgggaagattgcttgagctcaggaattcgagaccagcctaggcaacacagtaaaaccctctctacaaaaaatacaaaaattagttgggtgtggtggtgcacgcctgtagtcccagctattcaggaggctgaggtaggaggatagcttgagcccaggagagagaggctgcagtgagctgagatcatgccactgcattccacctgggcaatacaggcagagattatctgaaaaaaaaaaaaaaaaaggcctcagaaataacaccacacatctacaccatgtgatctttgacaaaccagacaaaaacaagaaatgggaaaaggattccctatttaataaatggtgctgggaaaactggctagccatatgtagaaagctgaaactgtatcccttccctataccttatacaaaaattaattcaagatggattaaagacttaaatgttagacctaaaaccataaaaaccctagaagaaaacctaggcaatgccattcaggacataggcatgggcaaggacttcatgtctaaaacaccaaaagcaatggcaacaaaagccaaaattgacaaatgggatctaattaaactaaacagcttctgcacagcaaaagaaactgccatcagagtgaacaggcaacctacagaatgggagaaaatttttgtaatctacaaatctgacaaagggctaatatccagaatctacaaagaacttaaacaaatttacaagaaaaaaatcaaaccaccccataaaaaagtgggcaaaggacatgaacagacacttttcaaaagaagatatgtatgcagccaacagacacatgaaaaaatgctcatcatcactggtcatcaaagaaatgcaaatcaaaaccacaataagataccatctcaaaccagttagaatggcgatcattaaaaagtcaggaaacaacaggtgctggagaggatgtggagaaataggaatgcttctacactgttggtgggagtgtaaactagttcaaccattgtggaagacagtgtggcaattcctcaaggatctagaactagaaataccatttggcccagccatcccattactgggtatatacccaaaggataataaatcatgctactataaagacacatgcacatgtatgtttattgcggcactattcacaatagcaaacacttggaaccaacccaaatgtcaatcaatgatagactggattaagaaaatgtggcacatatacacaatggaatactatgcagccataaaaaaggatgagttcatgtcctttgtagggacatgcatgaagctggaaaccatcattctcagcaaactctcacaaggacaaaaaaccaaacacagcatgttctcactcataggtgagaattgaacaatgagaacacttggacacagggtggggaatatcacacaccagggcctgttgtggggtgggggtatgggggagggatagcattaggagaaatacctaatgtaaatggcgagttaatgggtgcagcaaaccaacatggcacatgtatatatatgtaacaaacctgcacattgtacgcatgtaccttagaacttaaagtataataaaaataaggaagggaggggggaagggggagaaggaaggaaggaaggaaggaaggaagaaaggaaggaagccaggcatggtagcacaaacctgtagtcctagctactcaggaggatcacttgagaccaggaagtcaaggctgcattgagccatgactgcagcactgcactccagcacaggcaagagcaagaccctttctcaaaaagaaaagacctccccctccccctccccctccctctccccacggtctccctctccctctctttccacggtctccctctgatgccgagccgaagctggactgtactgccaccatctctgctcactgcaacctccctgcctgattctcctgcctcagcctgccgagtgcctgcaattgcaggcgtgcgccaccatgcctgactggttttcgtatttttttggtggagacggggttttgctgtgttggccgggctggtctccagctcctaaccaggagtgacctgccagcctcggcctcccgaggtgccgggattgcagatggagtctcgttcactcagtgctcaatgttgctcaggctggagtgcagtggcgtgatcttggctcgctacaacctccacctcccagccgcctgccttggcctcccaaagtgccgagattgcagcctctgcccggccgccaccccgtctgggaagtgaggagcgtctctgcctggccacccatcgtctgggatgtgaggagcccctctgcctggctgcccagtctgggaagtgaggagtgcctcttcccggccgccatcccgtctaggaagagaggagcgtctctgcccggctgcccaccatctgagatgtggggagcacctctgccccgccgccccgtctgggatgtgaggagcgcctctgcccggccgcgaccccatctgggaggtgaggagcatctctgcccagccgccccgtctgagaagtgaggagcccctccgcccagcagccgccccgtctgagaagtgaggagcccctccgcctggcagccaccccatctgggaagtgaggagcgtctccgcctggcagctgccctgtccaggaggtggggggtcagcccccgcccggccagccgccccgtccgggaggggggtggggggtcagcccccgcccggccagccgccccgtccgggaggggggtggggggtcagcccccgcccggccagccgccccgtctgggagggaggtgggggccagccccccgccggccagccgccccgtcagggagggaggtggggggcgcctccgcccggccgccgccccgtctgggaggtggggggcgcctctgcccggctgccccttctgggaagtgaggagcccctctgcccggccgccaccccatctgggaggtgtacccaacagctcattgagaacgggccatgatgacgatggcggttttgtcgaatagaaaagggggaaatgtgggggaaagatagagaaatcagattgttgctgtgtctgtgtagaaagaagtagacataggagactccattttgttctgtagtaagaaaaattcttctgccttgggttgctgttgatctgtgaccttacccccaacccggtgctctctgaaacatgtgctgtgtccactcagggttaaatggattaagggtggtgcaagatgtgctttgttaaacagatgcttgaaggcagcatgctcgttaagagtcatcaccactccctaatctcaagtacccagagacacaaacactgtggaaggccccagggtcctctgcctaggaaaaccagagacctttgttcacttgcttatctgctgaccttccctccactattgtcctatgatcctgccaaatccccctctgtgagaaacacccaagaatgatcaattaaaaaaaaaaaaaagaaacagaagaactgctgaaagccattgcactagagccgcactacccaatatggcagccactagacatgtgtggctactgagcacttgaaatgacctgtgtctgaattgaagtgtgctctaaatgtgaagtgcacaccagattttaaaggcttagtataaaagaagcataacatatctcattaataattgttttctggcagagtatggtggctcacacctgtaattccggcactttgggaggctgaggcaggcagatgacttgaggtcaggagtttgagactatcctggcgaacatggtgaaaccctgtctctaccgaaaatacaaaaaaaaaaaaaaaaaaattagccaggcgtcacagcgcgcgctacttgggaggctgaggcaggagaattgcttgaaccgcagaggcggaggctgcagtgagctgagatcgcaccactgcactccagcctgggcgacagagcaagactccatctcaaaaaataagtaaataagtaaataaataaataaaattaagcctttaaaaaataaaaaaaagaaaaaaaaagaaaagaaaaaattaaaaagaacactcaaataaaatcagatatgagagaggaaacattagaactgttaactacagaaatacaaaggatcataaaagactacttggaaaaattacatgccaacaaactggataacctagcagagatgtacaaatttctagacacacacaacctaccaaacactaaatactaaaaaggagaaaatctgaacagaccaataatgaagaaggagaccaaatcactaactaaaaatctcccatcaaacacacacctaggacttgactgcttcatggctgaattatataagacatctaagaatatctaaaccaatccttctgaaattattccaaaaaactgaagaaggatgctacaaagagaaacttacaggccaatatccctaagtatacagatgcaaaaatcctcaacaaaatactagcaagctgaattcaacagcacattaaaattatcattcataatgatcaagtaggatttatccctggaatgcacggatggttcaacatatgcaaatcaatgtgattagaaccacattaacagaattaagtataagaatcatatgatcttgtcaacagatgcagaaaaaggatgagatcacaccactgcactccagcctggacgacagagcaagactacatctcaagaaaaaaaaaaaaaaagtgctgaagaacattaaccaaaagattttttttttttttgagacagagtctcgctctgtcacccaggctggagtgcaatggtgtgatctcagctcactgcaacctccacctcctgggttcaattgattctcatgcctcagcctccctagtagctgggatgacaggcgtgcactgccacacccagctaattttgtatttttagtagagacagggtttggccacactggtcttgaactcctggcctcaagtgatcctcccgcttctatctcccaaagtactgggattacaggcatgagccaccatgcccagccccaaaagatttgtaacctcaaataagttgagaaacatgctcaagtatcttaggggaagagggatcaagtactccttccattcatctttttaaaaaacattgagctaccattctccatgaaaggcatctgccataacccatggagctggcaggggcagggagcatcagcaccaaaccagaatagcatcgcaacataggaggcacctagcaaggtgtagctggtgcaaatatacaaaagaggagcccaattctattgccagggtcccttcttcaaatcacagtcacttgtatgtgcattaagaaatgcccaattcacatgaacacatgactccagatcctggagaagaacaggataattacccctcttcctgggatcatggctggtaagcagtatcctggggtgcattatggggactagcacagggtccaaactttatgacaaagactcttggccaacactcggaagggacaacacaaagcatgacacagcaatacacataaactccaacaagacaggcagccttcccaaatggtacagggtggaaagtaaaaaagttcctcttcaaagtttcccttcttgttaaagaataaatcataagtgttagaaataatattttcttttaggctgggcacggtggcttacacctgtaatcccagcacttttggaggctgaggcaggtggatcacctgaggttaggagtttgaaaccagcctggccaacatggcaaaaccctgtctctagcaaatagacaaaaatgagccaagcgtggtggcaggtgcctgtaatctcagacacttgggagactgaggcaggagaatcacttgaacccaggaggtggaggttgcagtgagccaagatcatgccactgcactctagcctgggtaacaagagtgagactctgtctcaaaaaaaaaagaagaaaagaaaaaaaaaagaaataatagtttcttttaaagactaacttccttcaagcctccttgctttgtgctaataactctttgttaagccctatcctatgtagctgttagatataagggaatgagtacattctatgtccttgtactttaaccaagatatttattctagacatgctcagccatgtcccagctcacagcttatgccccttccttatttggaaatgttattacttctctaagtcttttcgtaagcaacttcctcttttcctttgttttcccttgtctttacctatttaggaaagttttaagttattggccagtcaggtttagcttagattgtgtggtccacctccagccaatgaagacaggacacagcagcagggacaagctccataagggataaaaattgcttccctcctttgttcatgtgtcatctcgtcattgttccatctgcgaggaccaccctttctgcagaaagtaaaattgccttgctgagaaaattctttgtctgagtactagttcttctcagcacagaggaacaagcatttctaaaggaataagcattttacttatatggccaatcagcaagccacaaaaggacaaagggcacttacaagagactttccaccccagttcaaagtgatcttcaccctttttaccaactgtgttgtaaatggggcactaagtcacttttgtgggatgtttcaggatccctccaacacactcttgcaattacactttgagaggctcatgatattagatttattatactcatagatcctagaaagggaggcatgccatgccatgcaggggtccatgctggaggaggaccaaagcaggaggctctgacaagcatgtagggagctaagagagaagcctcccttgagggcaactgcctttactggggcttggggtatagtactaaagcaaaaggcattagatttcattggtgcatttgaatgttactaggtcatggtcaggggagggccaacagaagaacttgtagcataagtaccttatcatccttgtacatctggtcacttgagcagggagctcacagcctgtttgttagaatgctgaggcatcaagaaaatatgaattttttaaaatgtacaatgtattcagggaagaatgacaatatggaacctggaacgaagacatctggttggatccagataagaaacatgatcttaaaccccactatgatttggatgtggtctgtccccatcacaactcctgttgaggcttggtcctcaatatcacagcactggaaggaggggcctaatgagatgtttgggtcatgggggtagatctcacataaatagattaatgctaccaggcagaagtgaattttagctcacacaggactgaattagttcccacaggagctaactgttataaagcaaggctgctgtttgtgtttggtcccttttgcacaagcctgcttcctcttctgcctctctaccatgttttgccgcaacacgtgagcctcatcagaagtagagcagatgctggggccatgctcttagactttccaaccagcagaatcctgagccaaagaaacctcttttctttataaattactcaggtattatgtcatagcaataataaagagactaacacaacctaagacactttgagcctcccttaccagggacgtagcttaccctttggtttctgaggagaaagccttctgcttgaaatttttgtgacaatctcatttggtccagataccttggaaggtaatatatattctcctcaagatccacaccattatcacttatttttatcactagagtcctaactagtccaaaatccagggagaaagatatacaacataatgcaagagaaaaaagctcacacaacaaaaaaattccaactctgataatatatcacaagaaacccagggaacatgtatgggatggattctaagggtattagatcaagaaggttaaaatgttaacattagataggcccaaattcattgatatggagcactgatatggtttggatctgtgtccccaccaaatctcatgtggaactgtagtccccagtgttggaggtgaggtctggtgggagatgattggatcatgggggcagatttctcatgaatggtttagcaccatctcctttgatactgtcctcatgatctggtcatttaaaagtgtacagcacctccccctcattctcccttgctcctggctcctgccatataagatgtacctactcctgcttcaccttctgccatgactggaagcttccagaggcctccccagaggcagaagtcactatgcttcctgtacagcctgcagaactgtgagccaattaaactttttttattctgcaatttaaaacttttaattaaaaaataaactttaatgttgaaaatgcaaacttggagagggcagaaagatcacacacaaggctgtcacttcacacttggaggtttgcacagtggctcgacagaggtgctcctcacttcccagacagtggggcggccaggcagaggcgctcctcgcttcccagacagtgcggcggccggttagaggcactcctcacttcctagacactgcagtggccagacagagtcgctcctcacttcccagacagggtggtggccaggcagaggtgctcctcacttcccagacggtgtggtggctgagcagaggcgctcctcacttcccagacggtaggcagctgagcagagatgctcctcactttccagacagtggggctgccgggcagaggtgctcatcacttgtcagacagggcggtggccaggcagaggtgctcttcacttcccagacagttgggtggccgggaacttctttataaattacccagtctcatgtatttttttttttttgagacatgtcacccaggctggagtgcagtggcgtgacctcggctcaccgcaagctccgcctcctaggttcacaccattctcctgcctcagccttctgagtagctgggactacaggcagctgccaccacgcccagctaatttttttgtattttcagtagagacagggtttcactgtgttagccaggatggtctcaatctcctgacctcatgatccgcccacctcagcctcccaaagtgctgggattacaggtgtgagccactgcacccggccagtctcttgtatttctttatagcaatgtgagaatagcctaatacaggtacttactagacattttgaattttacatattagctaatggaccatggcatgattctaatagctaaactggttggatgattgaaacttgtactcatgacctagttaacagagttaatatgtaagagcttccctggctaatgtaaaggagggaatcctagacacacaggaaggttgcactgaatttatcacatgtgatctgcacagcttcccttcttcaacctacattaagggcccagaagacaccctcttcacaaaggcattcagaaatagataactgaagggaatacttccattcttgaaaagttctgtttattctcctttaaacatttgttaagactacaggagataacaatcattaagatgagttccctgtttcaatggggatgatgagaaccttgagtgccaaaaaccaagtgggtagcacttaactatcaaagacaatgaggccacatcgaatgtcaagggcacactgaatgtaccaataattggaatgctttggcctgcagagattattggtgttagcaaactgatcacatttcgtcactagcatgaaacagataagaaccctactataacagggattaataaatcttgttgtaatgtgacatatagtaaatgttatactctgtgggccacacagtctctgttacaaatactcaactctgtccttgtagtatgaaagaagcctcagaaaatatataaacaaatgaacatagttgttctgttccaattataatttacaaaaacaggttgaagattaggtgtgtcccataagccacagtttgccaatgtaagtcttggaatattgcttgatctatgtaacaagaagtctcaagtctaatggccaaaaacctgataagagtcaccacaggggagattcaaagtctctcacccaatcaccagacctaggtaacacaccactcaggattgtgcagaagtcacatcgactttggagaattacgggggactatcataacttatatcaattctcctgttttccaccgaaatagtcttcagaggttttgctattacacaaaacattgcaacactccatcacattgaaaatattttgtacatgatatcccatgaacaggaaacagtaaatagtttggatacctttacaggctacaaagtagaggatgggagattcaagagccagctaaataaacaaagttggttttgttttgtttttttgagacagggtcttgctctgttgcccaggctggagtgcagtggtgtgatcacggctcaccacaacctccaccttctaggctcaagtgatcctcccacctcagcctcccaagcatctgggacgacaggtgcacattactacaccaggtaattttttttcttttaatcttttttggtatagatgggatctcactatgttggccaggctggtctcgaactcctggcctcaagcaatctgcctgccttggcctcccaaagtgttagagttacaggcctgagccaccatgccccatccaatcaacaaagatttgtgggttcagttgtctagaccatatcaagatatcccctccaaggtgtcattcctagttagtgctccccaaaattaggtgcaacacttggcagacctataagattcttggccaggcatggtggctcacacctgtaatcccagcactttgggaggctgaggctggcagatcatgaggtcaggagattgagactatcctggctaacatggtgaaaccccatctctactaaaaatacaaaaaattagctgggtgtggtggcacgcgtctgtagtcccagctactcaggaggctgagacaggagaatcgcttggacctgggaggcagaggttgcagtgagccgagatcctgccactgcactccagcctgggcgacagagcgagactccgtctcaaaaaaaaaaaaaaaaaaaacagggataaaggctactatggctcaacagtatggacttccatttaccaaagctaatgcagctaatgctactgctaggtgcctaatctgctaaaagcaaaaaccaaaactgaatatataagggcattaatttcttttttcttttcttttgggggggggacaggtctcactctgtcacccaggctggagtgcagtggcatgatcacagctcactgcagcctcaatctcctgggctcaagcaatctttctgcctcatgctcctgagtagctaggactacaggcatgtatcatcaagcctggctaatctgggtggttttcgtaggggggttgattttttgttttcatagagatggggtttcaccatgttgcccaggttagtcttgaaccaagggcattaatttctagagtaaccaggggagccagctggtggcaagatgattacattggaccactcctatcatgaaggtgactaagattcatcttcactggaatagactcgtgttctggatatggatttgccagaagcctaactagtagagaggcaaatccatataggatttgtatagaggcagatttgtacagaggagaggcaaatccactaggcttttgcctatacaatgcataatccatgcactcacaaaatgctttcactgcagtcacagcattcacacaataccatctttcatcaaggaacccatttcactgcaaaggaagtgcaacagtgggaacatgtccctctcatcagctggtctcatcacacaccccatcactcagaagcagctagtctaaatgaaaggtgaaatagcttactgaaaattcagatacagggccaactgggagacaacctctgaaagaatgggattctgtttcacaagacacagtgtatgctctgaatcagagatcactagatactactatctcaccacagtcagaacaaacaggcccaggaattgatgggtgaaggcagaattagctctaagacaaaaattttgcttccaatcccagcaatgtagagcactgtaatttggagatctgagtccataatggggaatgcttccccaggggcaactatttatttggtcccaatacactggaaagtgagattaacatctggcccttataagtttcatatccattaaaccaagaagaaaaagaaaaataaggaggtgagagggtataatctattaactgaagggattaatctcaactaccaaagggaaactggggtactactatacaactgaggcaaaaagaatgatgtctagaacctcctagcacttccataccacttagaaaggttaacaaaaaattaccgtagaaaaaaggcaggaaaatggaggaccaagatcccttcagaaggaaggtttgagtcactccatcaggtacagagcccagagctgctgattctggctgagggcaaggaaaatacaaaaaatgttcatcgaaaaagtaaaaccatggatagcaactataacttcaagatcaatgacagaaacaacaactgcagtagtctggcaggttttctgtttttgcttttttgagacggaatctcactctgttgcccaggcaggagtgcagttgtgccatctcagctcactgcaacctccacctcccagattcaagccattctcctgcctcagcctcccaagtagctgggattacaggcgcccgccacgcccaactaatttttgtattttcagtagagacaggggttcaccatgttggccaggctggtctcaaactcctgacgtcaagtgatccacccgcctcccaaagtgccgggattacaggtgttagccaccacacccagccccaggttttctctttgattgttacgtatacatgttagtttctaagcatgtatttacataaaccaatcattcacttctgtctcttttctatttctattttgtatataagttactagaggttaaatttttaatttagtcttcaggtaacagaatattcaaggagaatatgactaaatttcagtagaaattaacatggcttcaggcatggtggctcacacctgtaatcccagcactttggaaggccgaggtgggcacatcacctgaggtcaggagttccagaccagcctggccaacatggtgaaacactgtctctactaaaaatacaaaaattagctgggcgtggtggtgtgcacctgtaatcccagctacttggaagctgaggcaggagaatcacttgaacctgggaggcggaggttgcagagagctgagatcacaccaccactcccagcctgggcgaaagagtgagactccatctcaaaaaaaaaaaaaaaaaaagaaattaatatggcctgtgatgaggggctgtgcacattctcacttaggggtgagaaattctcccttcaatcttgttaagtggaaatgcagacttaaccattataagagaatcaaagtgtgtatagatgggcacatgtggatgctgactaggcaaaactgtgaacatgccagttaccaagttatccatctcagctccaaattcacgatcatatctgctaggaacaaagggctgcattccttaagcatttatcttttaatggaacatgttaagctttatcatgttgcattaaaagatgggagggaggccaggtgcaggggctcacccctgtaatcccagcactttgggaggccaacgtgggtggatcacctgatgtgaggagttcgagaccagcctacccaacatggcgaaaccctgtcactactaaaaatacaaaaaattagccaggcatggtggcaggtgcctgtaatcccagctactcgggaagatgaggcaggagaattgcttgaacctgggaggcagaggttgcagtgagccaagatcacgccactgcactccaccctgggcgacaagagcaaaactccgtctcaaaacaaaacaaaacaaaaaattagccaggcatggtggcgaatgcctgtaatcccagctactcagtaggctgaggcaaaagaatcacttgaacccgggaggcagaggttgtggtgagccaaggtcacaccactgcactccagacagcaataagagtgaaactccgtctcaaaaaaaaacaaacaaacaaaacaaacaaacaaacaaacaaaaaacctgctggtagattctaggagctgagcacagcctctagcaacagccagcaacaagtcctataactgcaaggaaatgaattttgcctattgactgagtgtggaaatacattctgttataggcagaggttggagcaagccgaggttgcaccaccgcactctagccagagcaacagagcaagactctatcaccaaaaaaaaataaataaaaataaataataataaaattctactgtaggtttcagctaaggcaattaaacaagacacagcatgcttatcaaatttgtaaatggactatagaatttgatgactgatagaactggattcaaaattactgccacaggctggagtgatacactgaataaataggatatttatttttaaaaaagaaatagaatatacaacacaagaattaaacaacactcatataaaatgtctcacacataaaatataaaccaaaacactacacttctggccagccacagtagtagctcacggctgcaatcccagcactttgggaggccaaggtgggccaatcacttgatgccaggtgttcaagaccagcctggccaacatgatgataccgcatctctacaaaaaaataccaaaattagccaggcgtggtggtgcatgcctgtaatcccatctacttgggaggctgaggcatgagaatcacttgaacccaggaggcggagggtgcagtgtattcagatggcaccactgcactccagcctgggcaacagagcaagaatctgtctcaaaaagtcgggggcggggaaagaaagaaaagaaagaaagaacactatacttctgaaaatatatttgagtattcttattcaggatgaaactgaacaagacactgactttctttttgaaaacaagtggctttcagttaaaactaaaatctattttcagatgtagcaacagtaaaacaaacaaacagaaaaaacaaacaaaaaacaaactaaagtctgttccttatttctctccagaataatttttacactttacaatacatccattcagaaactgccaaatggtacaagacctatggatgggaatttataatatccagcaaaattaaatgtatatttgtcctctgacctaaagtccaatattaaaggtttaacctagtaatacacttataaaaatgttaactacatataaagaagttcatttactgcagcttactcatggatgctaaaataattagtaggaacgttgccggggaacaagatattctgggcgtcctgcaagggatggtggctcatgcttgtaatcccaacattttctgagattgaggtgggaggatcacttgagcccagtagttcaaggctgcagtgagctaggatcgtgacactgcactccaccctgggcgacaaaatgaatctcaaaaacaaaaaacaaaaaacaaaaaaaccccgcaaatatatatatatttttgtattttgtatttttagtagagacagggattcaccatcttggccaggttggtagagaactactgacctcgtgatccacctgcctcagcctcccaaagtgctgggattataggcgtgagacaccgcaccaggcctggctttggtctttttgactaaacctcttctgaaatgtgttcaataaaaagctgaacttggaaaaaaaaaaggtgggggtgggggggacagggaggaaggcaagaaaaacaaaagacaacaaagaagatcctggccaggtgcagtggctcacgcctgtaatctcagcattttgggaggctgaggcaggcggatcacgaggtcaggagatcaagaccatcctggccaacatggtgaaaccccatctccactacaaatacaaaaattagctgggcgaggtggcacgtgcctgaaatcccagctactcaaaaggctgaggcaggagaatcgcttgaaccagggaggcagaggttgcagtaagtcgagatcacaccactgcactccaccctggcgacagaacgagactgtgtctcaaaaaaaaaatagaatgaaatcctgtcattttcaacaacgtagatagaactggaggacagtacgttaagtgaaataaaccaggcacagaaacacaaagttgggcgtggtaagcggtggttgcagtgagccaatatcatgccaccgcactccagcctgggcaacaaggcaacatcctgcctcaaaaaaactctcaaaaaaaaaaaatcttgaatagagctcagatccaaaaacattccgttatattttagaagaatttggagaattttcatttattatacatagtaaatattagataacattattatttttaattttcttgatgcaaatagtattacggttttagtaaaacaacactcttatcattgagtcaggcattacccactacttaaatgtcgagcttaccatcctggctatcacggtgaaaccccatctctacaaaaatacaaaaaattatccgggcacggtggcacacccctgtaattacagccacttgggaagctgaggcaggagaatcgcttgaacccgggaggcagaggttgcagtgaggcgagatcgcgccactgcactccagcctgggcgacacagctagaccccctctcaaaaaaaaaaaaaaaaaaaaaatgtcgagcttcatctctgcaatgaatttcccattgactctcaaactgttcaccataaaatttatttacgagacggcgaatacacaaaacgctaaaaaacaggtgcagctacaatggatatttattcgtggtactggatggtcaacatacccataggtttaagttttttcgaaaaaaaatgcgggaaaaatacacttagtacagtcatcctgttaatggtaaattcgattattctagtattagtgtgtaaaccctccatcctttcttccaggaagcctggttatgaagctctttggagacgtacagagctaggaacttcagatgaaaagaatggctgagtattcttaggtttctttagtagaaagactcgcggtctacaaacgtttatatgcacatgcagaaatacgcacaccctagacaactaagaaagcacctttctaccggaacgtaatgtgtcaataaaaaatatacaggtttcacaaaggcaaaatgccaaaatctcacatgaaacactcgtttgcataaaaaaggaagcagctgcccccttaaaccaactttttcccaatgctcacccgaacacggtggagtcgccaggtccgtggggctacaggatcttggggacggagtcaatcgaacgcgaacggcaaaattcttttccctctgaaacacaattcacaaacgttgccttggagacttattttttaaggcctcagaacgcttggacacttttgaagacgggaacacacggctgaaaacagccctcggacgcgcccatactgcacttcccacccggctcctctaggggaccgaaggtcccaatggcctcttcgacgtggcctcacccgatggctccgcgactcctgcggactcctgtggagtggtccaggcctctgtaaggaggttcctcgattaccctgggtcgattgtgacctctgccaccccccgaaacaccgcccaacccactagtccacacgagcctcaccaaagtagtgaacgaccagacaacacaaaggaaaaagtggctctgaggaaacaggcgccagcgaccaaaagagagaactggcgcgccgcaacgtcacttccgtttggggcattggaaggggcgtggctcgttgtgtgggcagttggacaggatggaactcttcaggattctagtttccctccgcgtgggtgcggaggtatcaaggggtcggctcagtgcctgggtgggcaagagagaaatggacccacagagaaaggtgggggttaaatcagggctgtgggcggggcccatgcccgggggcggggctggaggtgggaccagacccagccggtggcttcggtggcagaatggaccaggaaggcgaaacgtcgggcgatggactcgcccctcaggatgctcattagaaactttccccacgttcctggacccctttcaggattctctccagttgataacctgccaatccacaaaatggcctgcttcctgcattcgatcacgtctttagaactttattttctcttatttctttttatttatctgaccttgctaaactctaatcattgattcctctgcgttttcagttatcgatactttctgtaaatattgcaatttttttcttttctttcttttttcttttcttttctttttttcttcgaggtagggtctggctcggttgccaaggctggaatgcagtggtaggaacacggctcactgcagtctccacctctccaggctcaagccatccttccacctcagcctcccgagtagctgggaccacgggcgcaccgcacccggctaatttttgtattattattattatcatcattattattattttgtagagacaggatctaaccatgttgcccaggctggtctggaactcctgggctcaagtgatctgcccgccctgcactcccgaagtgggattacaggcgtgagccatcatgcaccatgcctggccttattgtatttttttttcttcttcaacaatgtatttgttactatttctcaaatcttatcaaatgattcaaagcctcctgtactactttatgaaataacactgataccaggcattcttcacttattctgtgcagaaaaagaaaggactgttggacttgtggtagagatttagttgaatcttcgggttatattggtatctttataatactgagtcttcctatgtgtgaatatacaatatctctctatttaggtcttctttaaactctttcagtaatgttttgaaattttcagtttacaaatattttacctcttggggtaaagttattcccatgtaacttatttgtaaaagggatcacattctcagtttccttttctgattgttcattgctggtgtatagatacaaaactaattttcatctcttgatgttgtactgtgcaactttacggaatttattacaagctctgctagttttcttgtagattcttcaaaattctctatatatcaaatatcacctataaatatatttttatttgttctattctaattgagaaaccttttattttattttcttgtgtaattgctctggctagaatttcctgtagaggctgggcacggtggctcactcctgtaatcccaacattttgggaggccgaggtgggtggatcacctgaggtcaggagttcaagaccagcctgaccaacatggtgaaaccccgtctctactaaagatacaaaaaattagccaggcgtggtggttggcacctgtaatcccagctactcgggaggctgaggcaggagaatcacttgaacctgggaggcggaggttacggagtttgcagtgagtggagatggctccattgcactccagcctgggtgacaagagcaaaacttcatctcaaaaaaaaaaaaaaaaaaagaatttcctgtagaatgttgaataacaatagaaaaatcagacatctttctctccttcctggtcttagggagaattttcaggcattcactattgaatatcacgttagctgtgttttcgtaagtgcgttttgtcacgttgaataaactcccttctgtttctagttttcttaattttttttttgagacaatctcgctctgtcacccaggctggagtgcagtggcatgatcttggctcactgcaacctccacctcccgggttcaagcaattctctgcctcagcctcccaagtaggtgggcactcccaagtgcccaccacaacacctggctaatttttttgtatttttagtagagacggggtttcaccagcttggccaggctggtctccaactcctgacctcatgatccacctgccttggccacccaaagtgctgggattacaggtgtgagccaccacgcctggccagttttcttaatttttatcaaggaaaagtgttgggtttcatcaaatgcctttcctgcattagttgaggtgattctgtgggattttttgtcttttgtactaatgtgaagaattacattttttaaatttccttttgttgaaccaaccttgcattcctagataaatctcactagtcatggtgtatagtgcttttaatgtgctgttggatatgatttgctaatattttttaaggatttttgcatctatattcatgaaagatagtctctaatttctttctctttagctttttttttttttttttttttgagatggagtctcacactattgcccaggctggagtgcagtggcacaatcttggctcaatgcagtcttgaccaccacaggctcaagccatcctcccacctcagcctctcaagaagctaggaccacagacgcatcaccatgcctggctactttgtgtgtgtgtgtgtgtgtgtgtgtgtgtgtgtgtgtgtgtgtgtgtgtgtgtggagtgttgctcttgttgcccaggctggattgcagtggtgtgatctcggctcaccacaacctccgcctcccgggttcaagcgattctcctgcctcagcctctcaagtagctgggactacaggtgtgcatcaccacacctggctaatttttttctatttttagtagagacagggtttcaccatgttggccaggctggtctcaaactcctgacttcaggtgatccgcccatctcagcctccgaaagtgctgggattacaggcatgagccaccacacctggctaatttttgtatttttttttgtagagatgaggtttcgccatgttacccaggctggcctccaactcctaagctcaagcaatctgaccaccctgggcctcccaaagtgctaggattacaggcatgagccaccactcccagcaagagatattttttatctggcttcagtaacaatgtaatgaatggcctcatggatttagaaagtgttctctctggccaggcacagtgtctcatgcctgtaatgccagcactttgggagaccaaggcaggcggatcacttgaagtcaggactttgagacctgcctggccaacatggtgaaagccaggctctactaaaaatacaaaaaattggctgggcatggtggcatgcacctgtaatcccagctactggggaggctgaggcaggagaatcgcttgaactcgggaggcgcaggttgcagtgagctgaaatcatgccactgcactccagcctgggtgacagagcaagatctcatctcaaaaaagaaaaaaagaaaaaaaaaagtgttctctcatgttttgttttgtttcggtttggtttggtttggtttggtttgagacagagtctcgctctgttgccaggctggagtgtagtggcgcaatgtcggctcactgcaacttccacctcccaggttcaagcaattctcctgcttcagcctcccgagtagctgggactacaggtgcataccaccacgcccagctaatttttgtgtttttagtagagatggggtttcaccatgttggccaggatggtcttgatctctttaccttgtgattcacctggctcagcctcccaaagtgctgggattacaggcatgagccacaacacccggcctcctgttctacttttttggaggatattgagaaacactggtgttgattactctttaaatgtttagtacaattcatttgtgaattgacaattcattgttggaaagttttgaaatactgatttaatctcttttcttgttataggtctcttgagatttttcattactgtttaatccagttaatttctgtgtttctagaaatgtgtccacttcatttaggttatctaactagttgtacaattaattgttcatagtatcctcttataatctttatttctgaatagtttgttgtagtgtgccccagtttcatttctaattttaattatttgcatcttctgccttttttgtcaatctaggtgaagtttttcaatgttatcgatcattgcaaagagtaacttttagtttcattgattctcattgaatagattcttatctattctccatttcacgtatttcccttctttattatttcctttcttctgttagattagtttactttcctcttttttggtagttcctcaagatataaaattatttataggtatttacagctataaatttcctactgaggccaggtaatgtggctcacacctgtactcccagcactttgcgaggccaaggtgagaagattgcttgagcccaggaattcaaagctgcagtgagctgtgatcatgccacagcactgcagcttgggggaccagagccagaccttgtctcaaataataataataataattttccactgagcactctcttcattgcatcctataagtttaggtctgtcctgtccatttttgtttttctctacatgttttcttttgtaatttgtttttgttgttgttgttgtttgtgactaacagaaatttttttcttatagctctagaggctggaaagtccaagaacaaggcacaagcagattcaatgtctcaggagggcctgcttcctggttcatacgattgtcttctcactgtgtcttcacatagtgcaaaaggaaaggcagctatctgggcctctcattttaaaattactttgttttttgatatgttttgagaaaggatcttgctctcttgggcaggctggagtagagtggcaaaatcacagcttactgcagcctcaaccaactgggctcaagcaatcctctcacctcaatctccagagtagctgggactacaggcacatgccaccatacccagttaattttttagaaaattttttgtagagacaggggttcactatgttgcctgactggtcatgaactcgcagcctcaagtgatcctcctgcatcagcctcccaacgtgctagaattacaggcatgagtcattgtgcccaacctaattgctttaattgacaaattttcattgtacatattaatggagtataaagtgatattataatttatgaatataatacagaataattaaacgaagctaattaacatatccaccacctcaagtacttattatattttgtggtaaaaacaggtgccttgtaatttgttcttgatctcctgttttttaagtgtgtgttaattcacacatatttatgtattttaatgtttttctgccattatagatttctagcttaattctgttgtgttctgacaggtactttatatatattcagtgcttttaaatttactgagactctgctgggtgcggtggctcacacctgtaatcccagcattttgggaggccaagagtggatggatcatttgaggtcaggagttggagaccagccttgccaacatggtgaaactctgcttctactaaaaatacaaaagttagccaggtgtggtggcatatgcctgtaatcccagctacttgggaggctgaggcaggagagtcacttaaacctgggagatggaggttgcagtaagccgaaattgcacccctgccctccagcctgggcaacagaacaagactctgtctcaaaaaaaataaaaattaaaaaaaataaatttcctgagactcattctgtggcatatacatttgacatatcctgaagatgttccatgtgaacttaagaatgtgtgttctcatgatatcagatggactgttctacatgtctctgaggcttagttggcttaccgtatttttcaagctatgtccttactgatcttctatgtagatgtccttttattaaaagtgtcatatataactctccaattattgctatagaacaatctatttctcccttaagttttgtcatataactttggggtctgtttttggtgcatgcatgtttatgattgctacatcttctttttctaatttttaatttttttaagagacagagtctcggctgggcacagtggctcattcctgtaatcccagcactctgggaggccaaggagggtggatcacaaggtcaagagattgagaccatcctggccaacatagtgaaagcccatctctactaaaagtacaaaaatcagctgggtgtggtggcacacacctgtagtcccagctactcaggaggctgaagcaggggaatcgcttgaacctgggaggtggaggttgctgtgagccaagattgcatcactgcactccagccaggcgacatagtgagcctttgtctcaaaaaaataaataaataaataaataaaagacagagtctcattatgttgcttacactgaacttaaactcctaggctcaagcaatcctcctgcctcagcatcccaagttgctagaattaaaggcatataccatcatgcatggcttattacatctcttgatgaattgaagcttttatcaatatattgccatcctttgtatattataaagtcttttacttaaagttcgtttgtctgatatcattatagtcaatccaattatcttttggttgctatttgcatggaatatcttcttcccatcctttcactaacagcctatctgttgctttttatataaagtgaatttcttgtagacagaatacgatttgatcatggtctttattatttcatccattcttcaacagcatgactttttcttggagtgtttgattcatttacatttaaagtaaaaataaagaaggattttcttcctgccattttgctatatgtgttctgaatgtcttatacttttagctccttatttcctccactgctgatttttttgtgtttacttgatttttagagtgaatcatttaactctcttctaattttcattgattttgttttgttttgttttgtttttcagacagtcttgctgtgtcgtccaggctagagtgcagtggcacaatcttgcctcccaggttcaagtgattctcatgtctcagcctcctgtgtagctgggactacaggcttgtgccactatacctggctaatttttgtatttttagtagagacagggtttcaccatgttggccaggctgatctttaactcctgacctcatgtgatctgcccacctcaccctcccaatgtgctgagattacaggtgttagccaccacaccaggctttcattcatatttactttctttctttctttctttctttctttttgagatggagtcttcttgctctgttgcccaggctggagtgcagtggtgtgatctcagctcactgcaaccaccacctcctgggttcaggtgattctcctgcctaagcctcccaagtaactgggattacaggtacgcaccaccacgcctgggtgatttttgtatttttagtagagacagggtttcaccatgttggccacgctggtctcgaactcctgacttcaggtgatctgcctgcctcagcctcccaaagtgttgggattacaggagtgagccactgcacccagccaaaactttaacagccctcataaggattacatttaccattccaaagttatattatttgaatttgtacctacttaacttcaatagcatacaaaaattctgctatacgactgcacgcttctgttgttttttttttttttgcaaaatatatctttatatattgtatgcctaaaacatacacttataatttttattgatttttaaaaaattcagtaaaaagtaaaaactggaattagatacaaaaataccataaatgtggttttatattttccaatatacttacctttactagagatctttatttctccacacagcttgagttactgtctagcatccttttattccatcctgaagaactccttttagcatctcttttatgtttatttgtttatttatttatttatttgagacagagtctcactctgttgcccaggctggagtgcagtggcacgatcttggctcaccaaaacatctgcctcccgggttcaagcaattttcctgcctcagcctcccaagtagctggcagtacaggcatgcaccactgtacctggctagtttttgtatttttagtagagacggggtttcactatgttggccaggctggtctcaaactcctgacctcgtgatccacctgcctcagcctcccaaagtgctgggattaaaggcatgagctaccacgtccagcagcatttcttgtatggcaagtgtagtggtaactgtccttggcattagtttttctaggaatgtcttaaattctccctcatttttgaacatttctggtgagcacagaattcttggttgatagtgtttctttttcagctcttaaatatgtcatctcaccgactatgtcccccatgatttctgatgacatatttgttattaatagtattgagaatcacttctttcagcactctttgtctttgccatttgacattttgatgatatgtgattcactgtaggcctgagtttctctttttttaatgttttttttttttgagatgaagttttgctcttgttgcccaggctggagtgcaatggtgcaatcccagcttactgcaacctctgcctcccaagttcaagggattcttgtgcctcaacctcccgagtagctgagaatacaggcacctgccaccacgcccgactgagtttctcttacttggagtttgttgagcttcttggatttaaagattcatgtctttcatcaaatttggaaagttttgcttaatatttcttcacattttacttcttcccctttatttctctgttatctttcttcagcttccataatgtgtatgttggtctgatgcatggtgtactacaggtcctttaagttctgtttggtcttcattctttttcctttagtcccctcagagttgatatttttcaaaggttctatcttcaaatttgtggattctttcttctgcatgctcacatcttctatggaagagaagatgcaaccagtgaccaaagaactaatgttaggagtttggctttacaaagaaaatagctccatgttatcttatttagaattggtaggtattttatttagaaagtattttgaaaagaaagtaaaaaaggatataatctagaaagaaaagtacagaaaactttacaaagaacactaaataaaaacgtttaaaaggaattaaaacagttccttctctgagaataaatgaaaatgtgaataaatggatagacaatgaaaaggtggaaaatctcatgtaatagtgttttttatcttctgccacagaccccagaggactgagcaaaggaggatgaacacaggaataaagacaaagataaaaagatctgttttaaaagaaggggtcagggggctccttgcttctagtgaacaagggccctgagcttctagagccctttgtatttattgagtaaaggaaatagggaggagcaggtgatcatgagccagttgcatgatttagtgcaggcctgcatgtctgctttccttgaacagtaggctccagatattccagtagataacctcaaggtgcacagtgccagggagtgattgccctcagcctaccttctggtggcaggcacagatgtgagtttgcccacatcctgcattcatgataaacagtttgctgtttgatcatatagcctccaatggaatgctgagttggtcatgaccctcaggttttcagctcccaatatctccccctttctgtttttgcattaattgaatgaatgtaaggccaggttgggcagctctcattttctgattggcagtccatccaattttatagactatgaacagaaaacaaagacagaacagcattattcccagaactatacatgagatgttaatgtggcgctttagataggtccaaggattgaggctctccagacctcactggaatttggtccaggcttctaaagaaggctgaaactcttgagtttgcttatttaaaccaataattttgtttcataattcaccaatatcaaaggcgatattggatgtgaaagctccctgcaaatgggctttcacaaggtcccatggatactcactttggttatattctaagttggttacacaaatatgagtgtgattaaaatgacagcacaattgctgttgcaattgtaagctttgtacttgttgccctaaccatggaaccatggatttcaacattgccacttcagtttgtaactcagtgttaattttactctgaagtagccatattttcttggtggtacatgtctagttctccacgtactgagctgtttgaacagaactatgcaaagctacagaggacattactacagaagttattagtgtgaccaaggaaataatagcaaaaattatcatgcctaagactttacgggtacaatgagtaagctgagttagaagtttcatgaagtgcaaagcaggggtggaggcccaaggctctgacagattaacaggaatccatatcccagggatgcgacccataattatcaaggtagagatgtgtttgcaatgtgctatgattaatgcagtgatataactgacaagatttacaggtcaattgggtattgtttacctggagctggtccttcttagctgccataaagacataaggattaaaaacacaaaccgtaaatttagtggtgatactctttacaaatgtaacatcaaaactgtgtcgagtagcagtactagtattagagagtacccctacccagatagtaccatttgtaaatgggactgctgctttccatattgtttcttgaattggacctttcctacctagatattgccactgaagaagaggcgggataaagcctgttccatgccaagcaaccctggcagcagaatgggattggatcctggtgtggtgtaaagaagaagcattgaaagtctgctaccaatgacagtgaagtttgtgccatgatgtctgattttatctttaccatctagttgacctttaggtccccaagtcacaatgtcttcagttaacatagattgttttctagccagtgggccaagacattgggtccatggagcggggtaggaactattgaagggaatccattccatatagtcaacacaattggggtgattgggccgggaatggttggttagcacaccagttacattaatagaactaagacctaataagcacatgacttttccatggtgactcaaccatgcttgagcttgaattgtaagacagctactacagttgagcaatatctttgtagtgatacaccaggggagtccttccagtggggccatataattgatgacattgttctgagagtctaactgttctatgtcaggaggagttagaggtcctggagcccatgctccctgatcatgatagatctcagggggagtgccactccaaagtacaagccatactactaggggattagaaacatatgcccaatatgtttttgcctctgcagagagaaaacataccacacaggacattatggctaacatggccaagaacatggattcaggggtttttgcctggccctgacgctccagcattttctcagcttcctgcgtggttttcttgagttgccctcaggttatggggtttgatgtcctcgtgactccggtcagccttttctccatcttcacactcaggctcagctggctcatggcccataccggagggaccaggcccatggttggccgccatggatccctccagtctcctgttccatggttgcatgcaccttgaggacacccaaatggtttgtccatctcctgtaaaaacacaagcataccctcatccccatgtcaataagtccaccaggcctttccattgtccttccagggatttccataacactttcagaagaactttcctctttttctctaacacttgccaatgtctttctgctggagtcttaccaccaataccaggagtcaaaaaatttaaagtaaatagggctaagtgtagttttgtttgaggtagtagctggtctgctattccctctttctgttttttcaacatgcattgtaatgtttgatgtgcctactctataattccttgtcctcaagggttgtaagcaattcctgttttgtgagtaatagctcaaagctgtaggaaattttgaaaagcattactagtataagcaggtccatttgccaagaccagctcggtcagggagacactaatccagcggtgctagaggaattaaaggcacacacacagaaatatagaggtgtggagcaggaaatcagggatctcacagccttcagagctgagaacctcgaacagagatttacccacatatttattaacagcaagccagtgataagcattgtttctatagattatagattaactaaaagtattccttatgggaaacaaagggatgggctgaaataaagggatgggtctcactagttatctgcagcaggagcatgtccttaatgcacagatttttcattctattgtttgtggtttaagaacacctttatgtggttttaattggtagcaaccaattaatgtcccctaacaattgtcaaaaatcatttaaagtctgtaacctgtctttacagagaaccattttctgaggccgtacactcctctccataacaatagttcctaagtaatggtatggggaagttgtttgcactttctctggagcaattttgagcttccatttaacaagagcttgctttacttctctcaataattgatgcaatatttgatctgtaggtgcaaccaaaagaatatcatccatgtaatgaatgatatatgcagtgggaaacatattttgaggctcttttaatgctctttgcacaaaatgctgacataatttggtactgttaagcacgtcttgaggtaaaactctccattaataatgagaaacaggttctttttttattaatagaaggcacagagaaggcgaatcaaggcttatctttctcatgtaatagtatagtaaagaaacaatctttaagatctgttactacaagaggccagtcccttgggatggctgcagggatggcagaccttgctgtaatgcacccattggtttaatctgtgcattagtagctcccaaatcatgtagcaatcaccatttccctgacttctttggaattacaaatactggtgtattccagaagctaactgactcttcaatatgtcacgcatctaattgctcttttactagctgatggagttgagctagtttctcctgtgataggggccattgatccacccacacaggtttgtcagtcagccattctagcaacaaagcagtggggagaggagaaatattaatgactccaatcataaatcctgatgtccctatctttttctgtctttccagttattgatatcaggttagggtttccttgtaggaatttttctaaacctttcccattctgatatcccatgtctttcaacattttaaatcctgggttatcaacgtgttcatttgtaggtcacatatcccaagctgtaagtaagtctcgaccccataaattgatagctatatttgcaacataaggctggaaagtacatgattgtccatccggaccaagacaaggtaaaatctcagcactctgttgaatgctttgagcagctcctattcccactagggatgtggaggttcatctgaggggccaagatggaggccaatccttactagatattactgacacatcagctcctgtatctacaagctcataaaatttttttcctttaatttgcactacacaggtgggtctattagaggctatgggttgtgataaatagatttctcatgcagttgtgctctcaaatcctttatttcctcatttctcctttcatggagaagggtgtaatttgcaggggataggcaataattgcactatatatgcacctggttcaaaaacccaaagatcttgtgacattaaaactactttaatttctccttcataatcagagtcagctactctggggactacattgatgccttgcaagttaaggcagctttgcctaaaattagtcccatgtatcctgctggtatatgtccccaaatgccaggggggactttggtaggtttgtctcctccaattagtgtaattctttctctggcggagagatctaatcctgcacttcctggtgttcctggggaaagggaatcaatatttgtcctgggacccacccctgaagtggggttgtggtctgaactgggaatgccctcattgtttgaggggcccaggtccaggcccccttatcgtttcccaacaggtggggtgccattctgatgaaattttgagtggcattgattagcccagtgatttcctttgtcacagcgaggacagagtcctggcattttttctgctggaaaggacaccacattgtaaagtcctttcttttctgagatctggtggcattcctttttaaaacttccagtttttccacaattttaacattttcccactttggggtttgacccttggctccctttagatttgtcaactactaaactagccattgcttgagctaacattgtagaatgatgattcagttcctacaccctgaaaggctttaaggtaattccccaagctctttgtggatctcagagcagccattgcatgcttgcaatctgcattttcattttcataggctagagttatggtaagcatttctgtagcagaggcctgagggacctgatgctgcactgcctcttgcagccacgtgataaattgtccataaggttcccatgatccctgcatgacaagtagaaaagactgcactggaactccctcttcaggaattgtgctccaagcatgcttagcggctaaggcagactggaggtaagcggtctctgggagtgttaattgttgtaccagatctgaaaaggggtcacagcctgtcagcattttctctgtagtgtttccttgaccagaggcatgattctgcccagcctggtctgtgcacatttcttgtcaatttaaactccatgcgagatatgcactgacagataagcaagtgcgagccaaatgttttatatcaaagggtgggaggcgcatggctccaaacactgatactaacagccttatagtaaacaggctttgcaacccattattaaccacactagcttttaattcttctagtaatttaaactctacaggactgtgctcatgtaaaagatgttgcagatcattcggatcaggccttacagtaataggaaaactgcaaggtcctaaaggttccccagccgtagcagcagcacacaaaattttttgtacatgggtttctacttctgttactggatggggtggcagaggtcaattctcctctcctatttcctgcttagcaaacagccaattctcctcccctttctcctgctcattattttcaataggcactgtcagagaaacaaatgatgtttttaattcttgagactcagaacctgactcctgttgtctgacagaataagaagacaatggcagtaggaccatgtgaaccaaaacccaagcagaaaaaacagaagggtctactttgagacattttgatgagcccatttcaatccctcttctactttgtcccaattttctacattgagagtgcctgcctgcagaaacaatgggttatgtgtcataacctcctgcagaagcctagttaatgtctgtgaattaacttgagctccaggctgtttcaacagaactttaagcaattgcacataatgtttttcttcaacagacaaattctgccccatgttaccctgattcagaacttcccattcccagcacttctttagagcactgaccttatactccctgctggcagatttgtccctaggtcctcgttcatcttgttagcttcacttcctctgctccagcagaccttcttcattcacgtccttgaagtccctgttcatgatgccactttgccacagaccctggtggactgaacaaagggggacaaacagaaataaagacaaaaacaaaaatatctgttttaaaagaaggggttgggggctccttgcttctagtgaacaagggccctgagcttctagagcccttcatatttattgagtaaaggaaatagggaggagggggtgattgtcagtcagttgcttgatttagtgcaggtctccatgactgctttctttgaacagtaggctccagatattccagtagataacctcaaggagcacagcaccagggagcgattgccctaggcataacttctggtggcaggcgcagatgtgagtttgcccacatgctgcatttatgataaacagtttgctgtttgatcatatagcctccagtggaatgctgagttggtcacaaccctcaggctttcagctccccaaatttttcactatagagaattcctttatgtaaggaattacttctttcagcactctttgtctttgctatttgacattttgatgataatgtgactcactgtgggcctctctgagtttctcttacttggagtttgctgagcttcttggatttagagattcatgcctttcgtcaaatttggaaagttttacccattatttcttcacattttaattcttcccctttatttgtctgttatctttctccaatggcttctcactagacaaggttatcccacacaatgacacttttctgcctggggctcacctgtacaggtgacttgaaggattcctctcttctctgacctcaccattttgtgctacaccttcttaatcatactacatttgcagagctgataccctgctcatgggacaagacacaggatgtgggagtcatgagtaggagacaagaactttgcataaaaagaattctaacactttggatttaaagcgttctgaagatagacaagtccaattttagaaacagcaaaataataagagtagaaaattttcacaaggactcaaaagcaaataccctcactcactaccccatatagaactaatccttgaaaaccataacagagaaaatgaaatccgtgcaatgaacagatttttattttcctgggaagtcactagactgcctcacaaggacaggaaccatccattttgtgttcaccactaacttgccattattatggcaaatcttggaacacaagacatgcttaagaacaactatttgctgcattacgaaagaagaaggaacaaggccagcctgctccatcaaggttaagtttctaaagttctccagcaacatgtctctgtacaggttttcccaaacaaagtccagtaatacccactcctccaacaataagtctactgccatttacttgaaggtcaaggagttctaaaacatcactcatatattctggctcaggcaatgagcatcttcaagaatgtaccaggatggatatcgcaggaggatgatggatgggctggtagcactagggaaggagactcaaaacaggaattcagacatgttcttgaggccacttattatctgccccatgactaacttctctcctcttttacccacagacactgaaccaccttctagatagaagctttaatggcttcactagcatatagttgacctgatttttccagtatgttgtaaaaactcatccagtggccaggcatggtggctcatgcctgtaatcccagcactttgggaggctgaggtggttggatcacctgaggctgggagtttgagaccagcctgaccaacatggagaaaccccatctttactaaaaataaaaaattagcctggcatggtatctcatgcctgtaattccagctacttgggaggctgaggcagtagaattgctcaaagctgggaggtggaggttgtggtgagccgagattgcactattgcactccaccctaggcaacaagagtgagactccatctcaaaaaaaaaaaaagggaggggagtaggggagaatgaatattgagaagacaactagctattatttgacctgcgaggtcagagagaattttcttataaataagaataaagaggccaggagtggtggctcacgcctataatcccagcactttgggaggacgaggcaggtggatcacgaggtcaagagatcaagaccatcctgaccaacatggtgaaatcccatctctactaaaaattagctgggtgtggtgatgcacgcctgtagtaatagctgtagttccagctactcaggaggctgagtcaggagaatcgcttgaacccaggaggtggaggttgcagtaagccaagattgcaccactgcactccagcctggtgacagagcaagattccacctcaaaaataaataaataaaagaataaggaagctgagcgcgatggttcatgcctgtaatcccagcactttgggaggctgaagtaggtggatcacctgagttcaggagttccagacatgcctgtcaccccaatatggtgaaaccccgtctctactaaaaatacaaaaaattagacaggcatggtggcacgtgcctgtaatcccagctactcaggaagctgaggcaggagaatcacttgaacctgggaggcagaggttgcagtgagctgagatcatgccattacactccagcctcgacaacaagactaaaactctgtctcaaaaaatatatataaataaaaataaagggccaggcgcagtggctcacacctgtaattccagaactttgggaggccaaggtgggcagatcacgagatcaggagatcgagaccatcctgaccaacatggtgaaacaccatctctgctaaaaatacaaaaattagccaggcgtggtggtaggcatctgtagtcccagctactcgggaggctgaggcaggagaattgcttgaacccaggaggcagaggctgcagtgagctgagatcgcgccactgcactccagcctggacaacagagcaagcctcagtcttaaaataaaataaaataaaataaaggccaggtgcagttgcttatgcctgtaatcccagcactttaggaggccaaggcaggaggctctcttgaggccagtggttctcgaccagcctgtgcaacatagtgagacccccatctctatttttttttttttttgagacagaggctcgctctgtcgctcaggctggagtgcagtggagcgatattggctcactgctagctctgcctcccagtttcacactattctcctgcctcagcctcctgagtagctgggactacaggcaccccacaacgcctggctaatttttttgtatttttttagtaaagacagggtttcagtgtgttagcaagatggtctcgatctcctgacctcgtgatctgcctgcctccgcctcccaaagtgctgggattacaggagtgagccactgtggccggccccccatcatctctatttttttttattttttttttaaagaagaaatgcgaccgctgagactgcatctatcccgcgagcacaaagccttgccctggccactctgccgcctatacacgcccgctgtcagctcaccatggatgatgatattgaggtgcttgtagttaacaatggctccggcatgtgcaaggtcaacttcgtgggcgacaatgccccccgggccatcttcccctccatcgtggggcatctgaagcaccagggcgttatggtgggcatcggtcagaaggactcctacgtgggtgaagatgcccagagcaagagaggcaacctgaccctgaaataccccatcgagcagagcattgtcaccaactgggatgacattgagaagatctggcaccacacctttttttttttttttttttttttgagacggagtctcgctctgttgctcaggctggagggcagtggcgcaatctcggctcactgcatgctccacctcccgggcttatgccattctcctgcctcagcctcctgagtagctgggactacaggcacccgccaccacacccgactcattttttgtatttttagtagagatggggattcactgtcttagccaggatggtctcgatctcctcacctagtgatccacccacctcggcctcccaaagtgctgggattacaggcatgagcctctgtgctcagcctggcacgacaccttctacaatgagctgcatgtttctcccaaggagcacccggtgctgctgaccgaggcccccttgaaccccaaggccagccatgagaagatgacccagatcatgtctgagaccttcaactccccatccatgtatatagccatccaggctctgctgtccctgcacgtggcctccagcttctccctgaagaagagattccagctgcctgacagccaggtcatcaccatcagcaacgagcggtccccgctgtcccatggcacttttccagccttccttcctggacatggaatcctgtggcatccatgaaactaccctcaactccatcatgaaatgtgacattgacatctgcaaagacctggatgccaacccagtgctgtccagtgacaccaccatgtacgctggtattgctgacaggatggaggaggagatcaccaccatggctcccagcatgaagaagatcaacatcattgctcctcctgagcacaaatattctgtatggatcagtggctccatcttggtctcgctgtcccccttccagcagatgtggatcagcaagcaggaatacgaggagtccggcctcagtattgtccaccctaccacaaatacttctaggcggacggtgacttacattataacctttcttgacaaaaacctaatttatgcagaaaataagattggttttttttttttttttttttggcttaagatttaaaacctggaatggtgaaggtgacagcagttagttggagcgaagaatcccaaacgttctacaatgtggctgaggactttgattatacattgttctttttttaaatagtcattccaaatatcgggaggtgcattctcttttttgtttttttgagacagagtctcactcagtcgcccagactggagtgcagtggtgcaaattggcacagtgcaacctccgcctcccaggttcaagcgattcttctgcctcagcctcccaagtagctgggattacaggtgcaccatcacacccagctaatttttgtatttttagtagagatggggtttaaccatattggcaaggatggtctcgaactcctgacctcatgatccacctgcctcagcctcccgtgctggcattacaggcgtgagccacctcgcccggctgggaggtgcattcttactggaagtcccttgccctcccaaaagccaccccatttctaaggagaatgcccagtcctctcccaagttcacatggggtggtgatagcattgcttttgtgtaaattatataaaattttttaaatctttgcctttgtatttttaattttgaatgatcagccatcatgtccccccatttttgtcccccaacttgagatgtataaaggctgttggtctccctaggggtgggtggaggaatggaggcagccagggcttacctgtacactgacttgacagcagttgaatgaaagtgcacaccttaaaaaaaaaaaaaggaaagaaaagaaattccatgtagacccatggtatgaccaattatcaatgacactagagaggactatctaaaagcatctattaataatccctcatgacagccaggtgaggtggcagaggttgcagtgagcagaggttgcacccctggactccagcctgagtgacagagggagactccatctcaaagcaaaaccaaaaaatccccaagttttgcagaatctggattttatggaaaaaaaaagaaaaaacaaaaacaaaaaaacttatcttggcagttaaacacacgctcactgttaaatgaacatataatgcaaatgagaaagtgtttacaactgcagtcatgaagaaagtgctaatttataaaatgtgcataacagaacaagtaatatattcagaaactctttcaaaaacaaatttaatcacataaaaccaccacagaaaactaaggggccacacgtcttatctgagaataggacaaacagaaagacaatttcatcttcatgtcatttatttgaatgtatccccaaaatgaattatcttatttgcaacaagagtgatacagaaaggcttccagagctgggcagggtgggtcatgcctgtaatcccagcactttgggaggctgaggtgggtggatcacctgaggttgggagttcgagaccagcctgaccaacatggagaaaccccgcctctactaaaaatacaaaaaaattagccgggcgtggtggcgcatgcctgtaatcctactcaggaggctgaggcaggagaatcgcttgaacctgggaggtggaggttgcggtgagccaagatcccaccattgcactccaaggctggatgcctggagaaacccagtggacacattcagctttcagcttattccaatcatgactgaagaggcccagccagaaaataagggtccccttgagccagcagcttagcttcaggtggagaaatgcatgataaaattatgataaagtttttccaaaagatgtagctgccaataggtaaagccacaaggctgctaatgtcaggctgctgcactcattccgtttccatttctatgtgaccagcgaagcttactgggacattcccttgctggtcactgaattctttggagatgtcaagcattcagtttcagaaagagattagtactacgtccctatctgatcttttttttttttttaagaggcagagtcttgctatgttgccccaggctggttgtgaactcctgggttcaggtgatcctcctgtcttggcctcccaaagtgcggagattacaggcatgagccactaggcccagcccctacctcaccttcttctttttttttttttttttttttgagatggagcttcgctcgtcgcccaggctggagtgcagtggcgcaatcttggctcactgcaacctccacctcctgggtttaaacaactttcctgcctcagtgtcctgagtagctgggattacacatccccaccatcatgcctggctaatttttctatttttagtagagatggggttttgccatgttggccaggctggtcttcaattcctgtcttggcctcccaagtagctgggattactggcatgcaccacaacacctggctaattttgtatttttagtagagatggggtttcaccatattgaccaggctggacttgagctcctgacctccagtgatccacccgccttggcctcccaaagtgctgggattagaggtgtgagccaccatgccaggccccctacctgaccttttaaagaagggacatgcttggtggctccgtcaggcagatattatggcgtgtgaaatatctaagggttgtatcccacttttccccttcccatggcttcacagcaatttacaatgcacaaaagaagccttatgaatgaacaaaggtgattccacttgatttacaagcaggtttctctccactgagtttctacaccttctataaggtatgaagtttttaaaagccctgccacgttccttttgtttctcttatttttcagtcaactttttcttgagacagggtctcattctgttacccaggctggagtgcactggcacaatctcggctcactgcaacctccacctcttgggctcaagtgatcttcccacctcagcctcctcagtagctgggactacagacgcacactaccatgaccagctaatttttgtacttttgtagagatgaggtttcaccatgttgcccaggctggtctcgaactcctgggctcaagtgatctgcccgcttcagccttccagagtgctgggattacaggtgtgagccactatgcccggcccacattccttatgatggggcttcaatccactctaagctcttccattttgtgcaagatcacgttctttgatttcatactacaagaaacctcttctttgtattcttttttctcatgtgagttttataagttctttcaccagatgagttcggatgctctaagggataataaaatggtttttcacatgccttagattcactgaaatggtctcctgtgtgatttcttacatttagcagaccaaagattgaaaagaggccaggtgtggtggctcatgcctgtaatcccagcactttgggaagccaaggtgggcagatcacttcagaccatgagttcgagaccaccctgaccaacatgatgaaaccccagctctactaaaaatacaaaaattagctgagcatggtggtacgtgcctgtaatcctagctactccagaggctgagagaggagaaatgcttgaacccaggaggcagaggttgcagtgagccaagatcatgccattgtactcaagcctgggcaacagagggagactgtgtctcacacacacacacacacacacacacacacacacacacacactacacagacagaaaacatttcattccttacattcataaggtttctttccattgtaactctgaacatgaatattaaagactatggaatatctaaaggttttctcacattctttactgtattattttgatagagttgaccaaaaaaaggaaccccacacattgaatggcttaaacaacagaaatttatttgctcataatttttgaggctggaagtccaggatcaaagtgtagataaggatgatttcctctataatgagccttaaaagaaggatctcctccaggaatctctctttgccttgaaggtaaccatttccggtcacttcacataaaattctgtgcctgctaccctggtatctctttcacttcttataaggaaaccagtcatattgaatgagggccccattctaactgcctcattttaaaatcacctctttaaaaaaccacatctctaaataccaccattatcttgaggtcccagggatgaaagccttaatgttaatgagtggatgggacatgtgacataatctaaatcagtggtcccctaactttttggcaccagggaccagtttcgtggaagacatttttcccacggactggagttggggattaaactgttccagttcagatcatcaggcattagattctcataaggagtgtgcaacctagatcccttgcatgtgcagttcacaataaagttcatgctcctatgagaatctaatgccactgctgatctgacagaaagttgagctcaggcagtaatgtttgctcatcctacattcacctcctgctgtgcaccctggatcctagcaggccacagaccagtaccagtccatggcccaggggtttggggatccctgacctaggccattccacttattatagtcatcaagttattctccagcatacattgcatatgaatattaaagcttgtggaacataaaagggttttcccacaatccttgaattcatagtttctctccagtttgtgttctaaaatgtttatcaaggactaagtggcaggcaagggctttcccacattccttacatcaatatggcttctctccactgggaatcctgacatacactttaaggcttgagaaataagtgaagattttcccacattccgtataaacataggttttctcctagtgggagttttgtggtatcagtcctatggattaaatgaagcctttcccatattttccatttacatagggtttcctgccactgtgaattcttacaagttcattatgacctgagataataaagaagtggttccagattcccaactctcacagcatttttctacaatgtgactgttcacatctttcatgtaaatgggaacaacagagagctttaccacaattctaacattgataagatttctctccagtgtgagttctttaatgacatggaaagggactgtaagaattgaagaactggctgggcgtgatggctcatgcctgtaatctcagcactttgggaggtcaaaccaggcagatcactggaggtcaggagttcgagaccagcctgatcaacatggagaatccctgccttcactaaaaatacaaaattagctgggcatggtggtacatgcctgtaatcccagctacttgggaggctgaggcagaataatcacttgaacctgggtgatagaggttgtagtgagccaagattgagccattgcactccagcctgggcaacaagagcaaaactctgcctcaaaaaaaaaaaaaaaaaaaaaaaaaaattcaagaatttatcatactacttatattcacagggtttctttaccatgtgagttcatatacttgaaatgaatttaaataactaggtttttcaacattgctttacattttcagggtttttcttcagtgagtttgtatgtggatattaaaaaggaaggattggctgggcgcggtggctcacgcctgtaatcccagcactttgggaggccgaggcgggcggatcacgaggtcaggagatcgagaccatcctggctaacacagtgaaaccccgtctctactaaaaatacaaaaaattagccgggcgtggtagcgggcgcctgtagtcccagctactcgggaggctgaggcaggagaatggcgtgaacccgggaggcggagcttgcagtgagccgagatcgcaccactgcactccagcctgggcgacagagcgagactccgtctcaaaaaaaataaaaataaaaataaaaataaaaataaaaataaaaaggaaggattatataaatccttttcaacatttcttatgctgaaagggcatctctccagagtaaattttcacacattcaataaggtttgagtaactagtgatggcttctctatattccttacattcatagggctctgtccaccatgagttcatgtttaagaaaggctgagcattgatgatgggtttttgttgttgttgttgttgttgttgttttgagacagagtctcactctgtcacccaggctggagtgcagtggcgtgatctcggctcactgcaagctccacctcctgggttcacaccattctcctgcctcagcctcccaagtagctgggactacaggtgcccgccaccacacccagctaatttttttgtatttttagtagagacggggtttcaccatgttggccaggatggtctcgatctcctgacctcatgatccacccacctctgcctcccaaagtgctgggattacagggttgagccactgcgcctagccttttatttatttatttatttttttgagacagtgtctcactgtttcccaggctggagtgcagtatcacaatctcggctcactgtgacctccacctcctggattcaagcaattcaggctggtcatgaactcccaacctcaggtgatccacctgccttggcctcccaaagtgctggtattacaggcataagccaccacacctggagttttagtcagagcttcagtgacctggaggaagggaaatatccaactccagccaactctatacatcctgacccaactaaagggtgggaaaaactgaagttcacagtgcagaagcacagactcactgcaagactgacatctaatccctggacaatagaatgctgcccctctccccacagcttatcatgattactagaggcctgcttacagcatttcctcttatccagtatgccatgtccagctaaggaaaaattacaagcatactaaaaggcaaaagttagtttaaagagaaagagtaagaaccagaaccagatatagcaggattgctgaaattatcagactgggaatttaaaacaattatgattgatatgccatgggttctactggataaagcagacagcatccaagaacagacaggcagtgtaaacacagagatggaaattctaagaaccacaaagaaatgctagaaattgaagacagtgtaacagaaatgaagaatgtctttggtaggcttattattggccaagaaacagccaactaaagagcttgagaatatatcagcagaaacatccacacctgaaaagcaaagagaagaataaaaaaacaagatataagaactgtgggataactacaaaagatgtatcctacatataaaggaaataccagatggaaagaaaaaaaaagggaaacaatgacagaatttctcaaaattaactcagacaccaaaacgcaaatccaggaggctaagcaaacaccaagaaggacgagcaccaaaaacctatacctaggcatatcatttaaaaataacagaatatcaaagataacaaaaaattttcatagaagccagagggggggaaatgctttaagtattgaggatcaagtataagaattacatccaactttgagcatagaaggaagaagtgaaggtaaaataaaaatgtttatttttctaatacttaattgatctgataacttctgaaaaatagctacaatgtattagattacatatgctaatttgtgtgtgtttataggcataaaagtgaaatatagtaatgatggaaggtctgagagggaggatttaggattattttgatagtataaggtactaacactactcaagaaacggtacagtattatcagaattcatgtacttattatggcatgtgaaatatttaaaggttataccatattccttaccttcccagggttctgaggtaattttacatgtgtaaaaaaaattctgtggaattaatgtaaggcttcctacatgcattacaggtaaaaggcttctctccagttcgacttcttacaccttctagaaggtagaaaacattaatgtaagcttttccacaatcctaatgggatttcagtccactccaagttccagtatggtgtatggggtcacattccttgcgttcacagtaaaagaaactttctttccttttttctcctctattttcacatggtctacgaccagacaacttgcatgtgaatattaaaatatagtgaacattcacaggctttttcatgctccttacattcatacaatttctctcctatgtgatttctcctgtatgtagaaaggactgaagactcaatgaaggctctcccacgtcttacattcatatagtttctctccagtgtggctttgcatgtgaatattaaggcttttggacaatctataaacgtttttgcttattgcttactgtattcacttgctagagccaccacaacaaaataccacagactgggtggctcaaacaagagaattttatttgttcaaagttctggaagcccaagatgaaggtgccagcagggttggtggctttgatagaaggatctgtcccagtgctctgtctttggcttgcagatggccatcatctgatgacttcacatcatcttctatttgttgtctcagttgtgtctttctcttcttatagggacaccaatcatattggattagggatgtactctaacagactcaatttaatcaaataattttcttttttttttttttttgagatggagtctcactccatcgcccaggctggagtgcagtggcatgatctctgctcactgcaacctctgcttcctgggttcaagtgattcacttgcctcagcctcccaagtagctgggattacaggtgcccaccacacctggctaaattttttgtattttcagtagagacaaggtttcaccatgttggccagggtggtctcaaactcctgacctcaagtgatccacccacctcagcctctcaaaatgctgggattacaggaattaagtaattttcatgcagcttcttctctccagagtgagttcattcatgtctttaaagtgaactggaacaaatgagagctttcccacatttattacatggacagtttctcactagtgaatttgttcatgtcttcgaagtgaacggggatgactgtaagctttcccgcattgctgacatttatagggtttctcttctgtgtgagttttttcatgaattctaaaggaactggaacacgtgaaggctttcccacactccttgcattcatagggtttctctccagtgtgagtcctttcatgtatttgaaatgaactggaatgactgaaggcctttccacattgtttacactcatagggtttttctccagtgtggattcgcatgtgaattttaaggtgggtggaatagttaaaagccttcccacattccttacaggtgtatggtttctgggcactgtgcgttcgcatgtgattattaagacatgagggatacccaaatactttcccacatatcttacactcacaggccttctcttcagtgtgagttctcaaatgtccactaagatttgaggaaactgcaaaggctttcccacattcaacacatacaaaaggcttctctccagtgtgagttcttatatgttgaataaggcgtgaggatgtaaggaaggatttcccacattccttacattcatagggcttgtctccactgtgagatcgtacatgcatactaaggcccgagtactgagtgaaggctttcccacattccttacatacatagggtttctctccagtgtgagttcttccatgtatctgaaatgagttggaataattgaaggctttcccacattccttacattcatatggtttctccccagtgtgggttcgcatgtgaatactgaggtaggctgggtatctatagccttttccacattccttacatttgtagggcttttttgcattgagggtttctataagcacagaaaggcttgtagagtcaataaaacctggcccataattcctccattcgtagagtttttctccattgtgagttctcatatgtgcctgaaggtatgactcattaatgaaggattttccacagtgactacattcaaatgacttttcttgtgtgctagttctctggtatacaatatttggtgtcaggctgaagattttttcactctgattaaactcagaaagtttctcaccagtagaggttttctcacacagggtaaggaaatcttttccatactgattacagtcatgagtgttccctgtactttgagttctcacgtgcgtcttaaggcatgagtgttcactgaagacttctccacattgctcacagtcacagagttcccttccattgtgttttccttcctgttgaagggatgatgatgatttaaggatttttctcaaacatattaacagaacatacccatctgaagctagaaacattataatggtgattataattgatgccatttttattacatgcattcaggtccttccctgtagatttattttaagtggtatgacttaactcttattctagaatgttgtgccatctactttaatcttggctaggcatggtgtctcatgcctgtaatcccagcactttgggagtccgatggggggcagatcacctgaggtcaggagttcaagaccagcatggccaacatggtgaaaccctgtctctactaaaaatacaaaaattagctgggcttggtggcacatgcctgtaatcccagctacttgggaggctgagacacaagaatcgcttgaacctgggaggcggaggttgcagtgacccaagatcacaccactgcactctagcctgggcaacaaagcgagactccgtctcaaaataataataataataataataacagatttctgtagaattcaatgtctagatgggtgcagtagctcacatttgtaatcccagcattttgggaggcaaaggtgggtggatcatttgaacccaggaattagagaccagcctgggcaacatggcaaaactccatctctataaaaaatatcaaaaaattagctgggcatggtggtgtgttcctgtagtcccaaccacataggaggctgaggtgggaggatcacttgagccaaggggtcaaggcttcagtgagccatgtttgtgccactgcaatccagcctgggtgacacagcaagaccttgtctcgaccaaaaaaaaaaaattcatagtctaagccagatgtggtggctcatgcctgtactcccagcacttttgtaaactgaggcagaggatcacttgagcacaggagtttgagactagcctgggaaacacagtaagaccctgtctccacaaaattttgaagaattagctgggtgtggtggtgcatgcctgtagtcccagctaccaagggaggctgaggtgggaggatcgcctgagcccaggaggtcaagactatactgagccatgattgcaccactgcactccagcctgggtgacagagcagtatctcgtttcaaaaaaacaccaaaacaaaactcaacgtctagttacacttgtgggaatgtgtgaaagctccaaagaaacaagtttcacaattggagcatccctaaattctttgctccctctcatgtgtatgcaacttctctcaaatatctcttatttttgctgacttcccataacagaattcctgattttctctgagggtggaaaataaaaaatatcctatgcaaatcttaccaattgtatcccaatggatgtctgacccctcaaaaagtcctgctgaagtatagaccactgggtttcaagtcgcatttcccatcctgaaataaaacagacaaacaaataaaaggactcaagctaggcacagtggctcatgcctgtaatcccagcactttgggaggctaaggcaggtggatcacttgaggtcaggagtttgagaccagcctggccaacatggcaaaaccccacctctactaaaaattcaaaagctagctgggtgtggtggtgagcacctgcaatcccagctactcacggggctcaggctggagaatctcttgaatccaggaggcagaggttgtaaggagctcagatcacaccactgcactccagccttggcaacaaacagagtgaaccacaacaagaacaaatgaaaggatttggagaaagaaatgcaaagagttcaaaacaatatggcttatttctatttgtttcaaattaaacatggcaagaaaaagcagaaagacatttggggatttgggctatatcaaaaatttggttttgatgtaaatgatccaaagggggaaaaattggccaagacaaggacatggggtaaaacttttcgatcgtttattacaaattgatgctatgaaaattaaaactgatagtgaatagagagaatcagggaatgaaagtaggaaatttctgaaaaaagagcgtatatctaaacaattaacttggccgggcacggtggctcatgcctttaatcccagcactttgggaggccgaggcaggcagatcacgaggtcaggatattgagattatcctggctaacacggtgaaaccccgtctctactaaagatataaaaaaattagccaggcatggtggcaggcacctgtagtcccagctacttgggaggctgaggcaggagaacggcataaacccgggaggtggagcttgcagtgagctgagattgcaccattgcactccagcctgggcgacagagcaagactccatctcaaaaaacaaaacaaacaaacaaaagccacaattaacttaaagaaatgttctaagaccccaggtggatgcctgaatcatggctagttctgaaccctgtacatactatgattcttcgatctggtaactgagatgaccgctacgtgactcacaggtggtgtacacagtgtagatacattggacaaaaggatgattcacaccccaggcaggatgacataagggttcatcatactactgagaatggtgagaaatttaaaacttatgttttgtttatttctggaaatttttctttttttcttttttttttttttttttttgtggggtgggggtcagtggccagggtctcactctatcacccaggctggagtacagtggtgcaatcacatctcaccacagccttgacctcctagtctcaatccatcctcacagctcagtctcctgagttactgggacagcaggtgcgtcccaccaccctcggctaatttttgtattttttgtagaaacaaggttctcggtatgttgcccaggctggtcttgaactcctgggctcaatgattcacccacctaggcctcccaatgtgtggggattacaggtgtgggccaccatgcctggccgagtttcccatttaatatttttggaccatggttgaatgcagataactgaaaccgtgaaaagtgaaatcacagacaaggggggactgctctgtaaataaaagcgtgtgggaagttaaatatttcctaactttctctaaaccttggggtttagagtgcagggagaaagtacatgttaaaaagtttcctaattatgctttcaaacatactgaacttctcatcaaccagagttgttcttcatgaacactcaccttggagaactcctccctgaactgtccttgactcttcttgttccaaccaagagattagactgggtttgatgatctgacctcctgagcacagagaaatacattaatggaagaggctcataaaaaagattacaaacctttctgtgattcaggaactacagatctaatgaaagtggtgaagctatttcaaaagggcgaaaaatgcaaataacaactctgactgtgccccaaacagtctggttacttctgtcccctaaaccgaaattcaggcttatgtacacatttaaaaagcactgagacttttattcaaacacaaaataatggccgagtgtggtggctcatgcctgtaatcccagcactttgggaggctgaggcaggtggatcacttgaggtcaggagttcgagaccagcctggccaacatggtgaaaccccatctcttctaaaaatacaaaaaaaaaaaaaaaatagctgggtgtggtggcgcatgccagtaatcccagctattcgggaggctgaggcccaagaatcgcttgaacccaggaggcagagattgcagtgagctgagatcatgccagtgcactccagcctgcgtgacagagtgaaactgtctcaaaacaagaacaacaacaaataaggaataaggaagtataacagagatcttcattcttctggggaaacaactaccccagtgttttttaaaacattattgtgcatcagagtcatccagagaacttgttcaaacacagattattgggcttcaactccaggtttctgggtggagaaggaaaatgtacatttctaacaggcagatggtgttgctattaatcttggaccacattttcagaatggtcacagtagattaaaatctatttaggacagggactatgtctctgttatttctctttgcattcagagttgacattgccaatgctgcaaaacagtaagtacaaaacatatcagttccatagaaggctgcaagggatgaggccagtcttacctactgtggccaggttcttgtagttctccagcatcacgtcactgtagaggcttctctgagttgagtccagtaaagtccactcctcctgggtgaagtccacagccacatcgtcaaaggtcactgaatcctaaagcatcacacacatgctggttggagccaagtaacaagcccatcagcgttcgctggaggatgaggaagggggacccaatgcctatgcaggattccaagggctgcagtgaccagccccaggttttaagggtcctagaaactcctcgcaccctaaacatactcactgtcatctcctccactcatagtgcattaatggcacttcttgaatatgaatttatctcagcacaaccagactaggagatctcttttttttttgaaatggactcttactctgttgcccaggctggagtgcactggtgcaatcttggctcactgcaacctccacctcccaggttcaagcaactctcctgcttcagcctcctgagtagctgaaattacaggcacacgccaccatgcccggctaattttttgtatttttagtagagatagggtttcagcatactggctaggttggtctcgaactcctgacctcatgatccgcccccttcagcctcccaaagtgctgggattacaggcatgagccactgtgcccgcccaagatctcatcttatttccatctatttgagcgcattgctcagcacattccagacatctgatcaatgctgataaacaacttaaaggacacttttttttttaatttttttgagacggagtcttgctgtgttgcccaggctagagtgcagtggtgcaatcacagctcactgcagcctcaacctccagggctgaagtgatcctcccacttcagcctccaaagtagctgggagtccagtcatgtaccactttgcccagctaatttttaaattttttgtagagacggggtctcactatgttgctcaggctgatcttgaactcctgtactcaagcaatctgcctgcctcagcctcctaaagtgctgggattatgggtgtaagccaccatgcccggcctgggatgatttccaagttagcacctccctatatgggtggccccaacccttggggaaattcaaatggggattcagtccttgagtgacactttatttgctttaagaagcctggagaccggagcttgcagtgagccgagagcatagcactgcactccagcctggcaacacagcgagactccctctcaaaaaaaaaaaaaaaaaaagaagtctggagacaactctgcctagagggaaatgtgtctacctggtggatgcaagtatgtcactatgtataagaatacagctgctttttacctgataacaatctgttaggcagtcagccactattcttcctgctggtgtcttttcttcatgaaggcaaactgggtccccagaaagataatgtcctgtaagaaaatgaaggcaagagaaccccgagctgaccataatccccacatccacctacctagaggtcattacctcctagtatgaaattcccatatattcctgcaaaatcaggaaaacacacataaggccagttgcagtggctcacatctgtaatcctagtgctctgggaggttgaggtggaaggattactttaggcgagaagtttgagatcagcctgggcaacacggtgagaccccgtctctacaaaaaaattttaaaatgagcctggtgtggtaacacacacctgtagtcccatctccttggggaagctgaggcaagaagattgcttaagcctaggagttcgagactaccctggacaacacagtgaacataaactccccatctctacaaaaaaatttttttaatcagccaggcatggtggcatgtgcctgcagtcccaggtacttgggaggcagaggtgggaggattgcttgagcccaacagtttgaggctgcagtgagctatgaatgcaccactgcactccagcctggacaaaagagcgagactttgtataagaaaaaaaaaaaaaagaaaagaaagaaaatgcaaacatacaacctactaccatacaatgccagagcagtcctaaacgtgatgatgagctgtgctgcccatcaggaaaagtacaatagtctcatttcacacataaggaaacatatacccagagcatgggactctatcatgctgattagaattcatgaaggagattatgcagtacctctttccaaaattcacaggcagagcctgactcacaagacagcacgttctggcacccctcagcacctcccaaatgaatcagcaacatgaccagctgcccaaaccactagaccctatattgtgtaaagggaacctagaacaggatatcctaaaaagagcaacagagcttaccatgggacaaatcagcagctgccatcccgcgaggtgagaacgtgtcagaaccctcctttcattgatgtcaccatcacttcaggacacctcattaatctaaatggacagtggcaatctccattcctctttaaacagggttattgggattcctgttggtattaatcaataatcaacaagcagtacttaatcatcagccatcaaacatatacaccggctggggcagtagctcatgcctgtaatcccagcattttgggaggccagggtgggaggactgcttcagcctagaagtttgagaccagcctgggcaacatagcaagaccctatctctaaagaaacaaaaataaaaataagtaaacaaacaaaaaaaaatgaagtggtaaaccagaacctgaatgcaagtacaagttttgcacacacacatagaaaaaataatctcacaatacacttttaagtattgggtagcctcaactgggccttgattggaaacactcaaatcaaatctgcatccccagctcacactgtcagagaggcaaggccaaaccactctgtgcctaacactggtctgttttatgggtcttcaaagagaactaccttttcatagtatttatctggttaatttttttccaccaaagtttggttttatttggctgggcagggtggctcacgcctgtaatcccagcactttgggagcctgaggccagaagatcatgaggtcaggagttcaagaccggcctaaccaacacggtgaaactccatctctactaaaaatacaaaaattagccgggcgtggtgtgcggctgtaatcccagctactcaggaggctgaggcaggagaatcgcttgatcctgggaaatggaagttgcagggagctgagatcacaccactgcactccagcctaggtgacagagcaagactctgtctcaaaaaaaaaataataataataataatgacaatcattaattaatcaaacatgaaacagtggctcaaacaatcacctacagaatgggagtcaaatgatgataaacagtgaaagttccgcagttcattatccatgaaccaaattcacaaaaactctataggcctccttctaccaataagactaaaaccctaaagtcacaaaaaccacagttctggactcctggtatagatcacacctactcccaggggtctcaaactaggggtcctagggctgactaggcccacaaatattcagtttggtggcatctgtatagaatatttaactctttttttttttttttttttggagagatggagtcttgctatgttgcccaggctggtcttaaactcctgggctcaagagatcttcctgcctcagcctctcaaagtgctgggatcacaggtgtgagccactgtacccagccagctttttttttttttcattgatatacaatcaatgtagcttaaaatgcacacatccttcgtttctcttttttttcttttgagacggaggctcactctgtctcccaggctggagtgcagtggcacgatctcagctcactgcaacgtccgcctcctgggttcaagtgattctcctgccttagtctcccaaatagctgagattccaagaccccaccaccacgctcggctaattttttttctatttttagtagagacggggtttcaccatcttagccaggctggtttcaaactccttaatccaaccatcctgttcattgtaaatttgattattgtgatactagaataataaagccttcatcctttccctctggaggtctgattaagaagctctcttgggatgtacaggcctaggaactccattcgaagataatgaattattattcttagtattctttagcagaaagacttgcggtctacaaacgtttatattcacatacacaaatacgcacaccctataaacctaaaaagcatctttatctttcgccatgaaagtaatggtcaaaaataaaacacaacacaataagacgaaaccaaacttacagatgaaacattcgtttgcataagagaagacagaaaaggccccctagaaccaactttcacccagtgctcaccggaacactcagaaatcgccaggtccctgaaccgggaagatcctggggacggagccaacgcggatgcaaaaggcagcaattattttcctgccggaaaaaaattcacaaacgctgctttggaggcctttggagaggggcgcacagatgaaaacaccctgcggacaccgtaactataaacccgactcctcccgaggagcgacggtccgagcggacgctagcgggcccagcagacacgagcagagcgggccaggcctctctaacgtccgggccaaacccgtccttcaccccaaaaccagttcatctcctcggaactcacccaggccagtgaggccttaactctgaaaggcaaaaagactctcaggcgctcacagccggcgtcacaaaaggaacggcgcaccgctgacgtcatttacgctctccgcctcgggccaggcggggtttcgggactagggtttctgccgtgtaatacctcctcgaggcagaaaaattctactttccatctgcttggctgcggaggaccttggggtgggctcagcgtgggggctgcaggcagaaatgggtccagaaggcaaggtcgaggttagagccaagcctgtgggcagggctacgggcagggggcggggaggaatgtgggtccaggcccagaggaaaaggttgaagttatagccaggcctgtgggcgaggccgcagcagggcggccataggggaaggagccaatgtgttatgcatgtagaaaataggtaactacgtcttttgctctgttactatttcaacatttgatgtaaaaaacattttctatgcagctaaaagaattgtttttaaaaataatttctaggttttctgccttgctttaaaacatcttttctttttttttgagacaaaatctcactctgtcaccaaggctggagttcagtggagccatctcagctcactgcaacctccacctcccaggttcaagcgattctcctgcctcatcctcccaagtagctggaattacaggtgcatgctgccacaccctgctaatttttgtatttttagtagaggcagggttttgccatgctggccaggctggtcttgaactacttgtcaggcctctgagcccaagttaaatcatcataaaccctgtcacctgcacgtatacatccagatggcctggagcaactgaagaaccacaaaagaagtgaaacagccagttcctgccttaactgatgacgttccaccattgtgatttgttgctgccccaccccaactgatctcttgaccttgtgacattcttcttctggacgagtctcaggagttccccaccgagcaccttgtgacccccggccctgccagcaaaagataaccacctttaactttccactacctacccaaatcctataaaactgccccacccctatctccctttgctgacccctttctcggactcagcccacttgcacccaagtgaataaacagccttgttgctaacacaaagcctattggtggtctcttcacatggatgtgtgtaacatttggttccgaaacctgggacagggggactcccttgggagactggccccgtcctcaccctcactccgtgaggagctccacctactacctcgggtcctcagactagcccaaggaacatctcaccaatttcaaattgggtaagcagtctcttcactctcttctccagcctctctcactacccttccatctctctgtccttccaattccagttctttttcctctccagtagagacaaaggagacacattttatctgtggacccaaaactccagctccagtcacggactcaggaagacagtctttccttggtggctaatcactgtagggatacctgcctgattattcacctacattccattggtgtctgatcactgtggggatgcctgccttgatcattcacccacattcccttggtggcaagtcaattgcagggctgcctgctttggctgcttacccacattacagcccagggctgctcacccccaccccactccactgccttctccatgtctctacctttctctttaaacttacctccttcactatgggcaatcttctgccctccattccctgttcttctcccttagcctgtgttctcaagaacttaaaacctattcaactcacacctgacctaaaacctaaataccttattttcttctgcaacaccacttggccccagtacaaacttgacaatggttctaaatggccagaaaatggcacttttgatttctccatcctacaagatctagataatttttgtcataaaatgggcaaatggtctgagatgcctgacatccaggcattctttacacattggtccgtccctagtctttgctcccaatgtgactcatcccaaatctttcttgtttctttcttgtcctttgaatcctccttttctatggacccatctgacctctcccctccccctcaggctgctcctcgccaagctgagccaggtcctaacgtatccagaattggtgggttcttggtctcactgacttcaagaatgaagccgtggaccctcgcggtgagtgttacagttcttaaaggcggcgtgtctggagtttgttccttctgatgttcggatgtgttcagagtttcttccttctggtgggtttgtggtctcgctggctcaggagtgaagctacagacctttgcggtgagtgttacagctcttaaaggcagcatggacccaaagagtaagcagtagcaagatttattgcaaagagcaaaagaacaaagcttccacagcgtggaaggggacccaagggggttgccactgctggctcagtagcctgcttttattctcttatctggccctacccacatcctgctgattggtagagccgagtggtctgttttgacagggtgctgattggtgtgtttacaaaccttgagctagatacagagtgccaattggtgtttccacaatccctgagctagacataaaggttctccacatccccaccagactcaggagcccagctggcttcacccagtggatcccgcactggggctgcaggtggagctgcctgccagtcccgcgccatgtgcccgcactcctcagcccttgggtggttgatgggactgggcaccatggagcaggggggagctctcatcagggaggctcgagctgcacaggagcccatggagggggtgggaggctcaggcatggcgggctgccagtcttgagccctgccctgtgggaaggcagctaaggcctggcgagaaatcaagcgcagcaccagtgggctggcactgctaggggacccagtacaccctgtgcagctgctggcctgggtgctaagcccctcattgcctggggccagcagggccggccagctgcttcgagtgcagccgccaagcccacgcccacctggaactccagctggcccgcaagcaccatgcacagccccagttcccgctcgcgcctctccctccacacctccctgcaagctgagggagctggctccagccttggccagcccagaaaggggctcccacagtgcagcagtgggctgaagggctcctcaagtgccgccaaagtggaagctcaggcagaggaggcgccaagagtgagcgagggctgtgaggactgccagcacgctgtcacctctcactaattcttcctcagcctctgctccctaccctgtgatctttctatcacctccccttctcacacccggtccagcttacagtttcattccatgactagccctcccccacctgcccaacaatatcctcttagagaagtggctggagctgaaggcatagtcgaggttaatgctcctttttcttcatccaacctctcccaagtcagttagcatttaggctctttttcatcaagtataaaaacccggcccagttcatggcctgtttggcaacaacccttagacagtttaccaccctagaaccagagaggccagaaggccatcttattctcaatatgcattttattctcaatatgcattttattacccaatctgctcccaagactagaaaaagctccaaaaattagattctgaccctcaacccccacaacaggacttaattaacctcaccttgaaggtgtacaataatagagaagaggcagccaagtggcgttgtatttctgagttgcaattacttgcctctgctgtgagataaaccccagccacatctccagcacataagaacttcaaaatgcctaaaccacagaggccaggtgttcctccaggacctcctccctcaggttcttgctttaagtgctggaaatctggccactgggccaaggaatgcccgcagcccaggattcctcctaagccatgtcccatctgtgggaccccacttgaaatcggactgtccaactcacctggcagccactaccagagccactggaactctggcccaaggctgtctgactgactccttcccagatcttctcggcttagcagctgaagactgacactgcccgatcacctcgggagcctcctggactatcacagatgctttgggtaactcttacagtggagggcaagtctgtccccttcttaatcaatacagaggctacccactccacattaccttcttttcaagggcctgtttcccttgccttcataactgccgtgggtattgatggccaggcttctaaacctcttaaaaatccccaactctggtgccaacttgaacaactttcttttatgcactctttttagttatccccacctgcccagctcccttattaggtcaagacattttaactaaattctctgcttccctcactattcctgggctatagccacacctcattgccacccttttccccagttcaaagcctcctttgcctcctccccttgtgtctcactaccttaatccacaagtatgggatacctctactccctccttagcaactgatcatgcaccccttatcatcccttgggggtaaaacctaatcacccttaccctgctcaatgccaatatcccatcccacaacaggatttgaggggactaaagcctgttatcacttccctgttacagcatgaccttttaaagcctacaaactctccttacaactctcctatcctacctgtccaaaaactggacaagtcttacaggctggtccaggatctttgccttatcaaccaaattgtcttgcctatccaccccatggtgccaaacccatatactctcctatcctcaatacctccctcctcaacccattattctgttctggatctcaaagatgctttctttactattcctttacacccttaatcccagcctctcttcactttaacttggactgaccctgacacccgtcagtctcagcaacttacctgggctgtactgctgcaaggcttcagggacagcccccgttacttcagtcaagcactttctcatgatttactttctttccatccatctgcttctcaccttattcaatattttgatgacctcctactttatagcccctcctacaaatcttcccaacaggacaccctccggctcctccaacatctattctcaaagggatatcgcgtatccccctcaaaatcccaaatttcttcttcatccgttacctatctcggcataattcttcataaaaacacacgtgctttccctgctgatcatgtctggctaatctcccaaaccccaatgccttctacaaaacaacaactcctttccttcctaggcatgcttgggtactttcacctttggatacctggttttgccatcctgactaaaccattatataaactcacaaggaaacctagctggccccatagatcctaaatcctttccccactcctctttccattccttaaaaacagccctggaagctgctcccacactagctctccctaactcatcccaacccttttcattacacacagccaatgtacagaactgtgtggttggaattcttacacaagagctgggaccacgccctgtagcctttctgtccaaacaacttgaccttactgttttaggcttgccctcatgtctccatgtggtggctgccaccactttaatacttttagaggccctcaaaaccacaagctatgctccatttactctctacagttcccataactttcaatatctattttgttcctcacacttgacacatatactttctgccccctggctccttcaactgtactcaccattcgttgaatttcccacaattaccattgttcctggcccagacttcaatccggcctctcatcttattcctgatactacatctgaaccccatgattgtatctctctaatccatatgacattctccccatttccccatatttccctgtttcctgttccccacccagaccacacttggtttattgatggtagttcttccaggcccaatcaccaatcactggcaaaggcaggctatgctatagtgtcttccacatctatcattgaggctatggcccttcccccttccactgcctctcaacaagctgaactcattgccttaactcgagccttcactcttgcaaagggaatacgtgtcaatatctatactgattccaagtatgccttccacatccttcaccaccatcctgttatatgggcagaaagaggtttccttactacacaagggtcttccatcattaatgcctcctcaataaaaactcttcttaaagctgctgtacttccaaggaagcttgtttcattcactgcaagggccatcaaaggacatcagatcccattgctcaaggcaacaattatgctgataagggagttaaagaagcagctagccttccaacttctgtccctcatggccagtttttctccttctcatcagtcactcccacctactctcccactgaaacttccacctatcaatctcttcccaaacaagacaaatggttcttggatcaaggaaaattcctccttccaccctcacagcctcatttcattctatcttcctttcgtgacctcttccatgtgggttacaagccactagcccacctcttagaccctctcatttcctttccatcatggaaatctatcctcaaggaaatcacttctcagtgttccatttgctattctaccactcctcagggatttctcaggccccctccctttcctacacatcaagctcaggggttcacccatgcccaggactggcaaattgactttatccacatgccctgagtcaggaaactaaaatattcttggtctggtagccactttcactggatgggtagaggcctttctctcaggcctgagaaggccaacgtggtcatctcctcccttctgtcagacataatttctcgatttagacttactacctctatacagtctgacaacagactggccttcattagtcaagtcactcaagcagtctctcaggccttgggcattcaatggaaacttcatgccccctaccgccctcagtcttctggaaaggtagaaaggaataatggtcttttaaaaacacacctcaccaaactcagccttcaacttaaaaaggactggacagtatttttaccacctgccctcctcaaaatttgagcctgtcctcgggatgctacagggtacagtccatttgaacttttatatggacataccttcttgctgggccccaacctcattccagacaccagccctctgggggactaccttccagtcctccagcaggctagacaggaaatttaccaggctgctaatcttcttttgcctactccagattcccagccatatgaggacaccctagctggacgatcagttcttaagaatctgacccctcaaactctacaaactcggtggactggaccccacttagtcatctatagtactccaatggccatccatctgcaggaccctgcccattgggttcaccattccaggataaagctgtgcccatcggacagacagcctgatctctcctcttcctcctggaagttgcaagtactcacccctacttcccttaaactcacccgcatttctgaagaacagtagtgacacttgtgagcctaatacaccctttcattttgttaggtctattcttccttaccctgatctttacaacagggcttcacacagtcacccccactacttggactgtaccccaaaacttttcatccctgctatcttctgtctagtcatactcctactcttcattctcacctacccataaatgtcctgcccttgtctacactgccagtttacactttttctccaaaccatcatagctgatatctcctggtcttagcccctaaccaccactcttaactcccccttggagtggatagatgacctttgctggcaaggcacactccaattctttcaccctgatgaagtccttttctttacttttcctcattcccattctcctgccatcctctacccctccctaattacctccaacatactatcaatctcgctcactccctcctcactctttctaatccctccttagtgaacaattgctggctttgcatttcccttttttcctgctcttacacagctgtccccaccttacataccgactgggcaacatctcctgtctccctacatctctgaacctcctttaacagccctcatctttacccttctgaagaacttctttactttctagacaggtctagcaaaacctcagacatttcatatcagcaagctgatgctcttctccgcatctacttaaaaaatctttatccttgattgaaaccatcctggctaacacggtgaaactcgtctctactaaaaatacaaaaaattagctgggcatggttgcaggcacctgtagtcccaggtactcaggaggctgaggcaggagaatcacgtgaacccaggaggcagagcttgcagtgagccgagatcgtgccactgcactccagcctgggtgacagagcaagactctgtctcaaaaaaaaaaaaaaacctttatccttatattaattctactccacccatatttgaacccctcacaacataaactactatccctgttgtcactcctttgtgcatctctcggcaaagactgactggaattcccctaggtaacatttcaccttctctatgcttcttcactcttcatctccaaagcccaactacacatattaccaaaaccaatggggctttttagctccacattatagataagccctctatcaatactggcaaacttaaaaacattagcagttactattatttaggaagacatttgtcctgcacttcactccatccttggctaccttccccttgttcttcagcctctcctcccagccccccttcttgtttacttatacacaaccccatgaatagcaatgaaaggttgcttgtagacactatgagttttctaatacaccatgaatactgaacctctccctctacccagttgccctatcaatccccattacaacttctaacggctgctgcccttgctgtgagaggtgacaacatgctggcggccctcactcactctcagcacctcctcagccttggtgtccacctggccacacttgaggagaacttccacccaccactgcactgtgggagcccctctctgggctggccaaggctggagccggctccctctgcttgcagggaggtgaggagggagaggcatgggtgggaaccggggctgtgctcggcgctcacgggccagcgcaagttccaggtgggccctgcacttggagcagtcggctggcaccaccagccctgggcagtgaggggcttagcacctgggccagcagctgcggagagtgcgccgtgtcccccagcactgccagcccacccatgccatgctcgaattcttgccatgcctcagccgcctccccacagggcagggctcaggacctgcagcccaccaggcctgagcccccctgtggtgggctcccacatggcccaagcttccccaacgggcgccaccccctgctccatggtgcccagtcccattgactgcccaagggctgtggagtgcaggcatggcatgggactggcaggcagctccgcctgcagcaggatccactaggcaaaccagctgggctcctgtgtcgggtggggacttggagaacttttatgtctagctagaagaccgtaaatgcaccaatcagcactctgtgtctagcttaaggtttgtaaacgcaccaatcagtgctctgtgtctagctaatctggtggggcttggagaacctttatgtctagctaaaggattgtaaatacaccaaccagcactctgtgtctagctcaaggtttgtaaatgcaccagtcaacaccctgtgtctagctcaaggtttgtaaacacaccaatcagcactctgtatctagctaatctggtgaggacttggagaacttttatgtctagctagaggattgtaaatgcacgaatcagcactctgtgtctagctcagggattgtaaacgcaccaatcagtaccctgtcaaaaaggaccaatcagctctctgtaaaatgcaccaatcagcaggatgtgggtggggccagataagggaataaaagcaggctacctgagccagcagcggcaacccgctcacatcctcttctacactgtggaagctttgttctttcactctttgcaataaatcttgctgctgctcactctttgggtccacactgcctttatgagctgtaacactcactgtgaaggtctgcagcttcactcctgaggccagcgagaccacaaacccaccaggaggaatgaacaactctggacaggaggaatgaacaactacagactcacagccttaagagctgtaacactcactgcggaggtctgcagcttcactcctaaagccagcaagatgacgaacccaccagaaggaagaaactccaaacacgtctgaacatcagaaggaacaaacaactacagactcacagccttaagagctgtaacactcactgcggaggtctgcagcttcactcctaaagccagcaagatgacgaacccaccagaaggaagaaactccaaacacgtctgaacatcagaaggaacaaactccagacacaccacttttaagaactgtaacactcaccttgagggtctgcagcttcattcttgaagtcagtgagaccaagaacccaccaattccagacacagctggatccctaggagtctgggtgcacctcttttggcgctccctctcatcttttcactttacatttccagttttgccttacacaagatctcttcttccctgtgactcctccacctacatgtgtctacctattaattggacaggcacatgtacactagttttccttcttccaaaaaatcgatttgcaaatgggactgaacagcatcctgttcccctcaggacacgaacacttcactacagttttgtttttcttattaatataagaagacaggaagaggcctcgacttactcactgctgaaaaaggaggactctgcatatttctaaaattagaatgttgtttttacctgaatcagtgtgccctgaattaagactacataaaaaactcaaaggtagagcccaaaaaactcaccaaccaggcacataattatgctggacctccctgggcactttctaataggatgtcctggctcctcccaattcttagtcctctaatacttgtttttctccttctcttattcagaccttgtgtcttccgtttagtttctcaattcatacaaaaccacatccaggccatcaccaatcattctatacaacaaatactccttttaacaaccccacaatatcaccccttttctcaaaatctttcttcagtttaatctctcccactctaggttcccatgttgcccctcatcccacttgaagcagccttgagaaacattgcccattatctctccatagctccccccaaaattttcattgccccccaacacttcaccactattttgtttttctgattaatataagaagactggaatgtcaggcctccaagcccaagctaagccatcataacccgtgtgacctgcacgtatatatgcagatggcctggagcaactgaagaaccacaaaagaagtgaaacagccagttcctgccttaactgatgaggttccacaattgtgatttgttcctaccccaccccaactgatctcttgaccttgtgacattcttctcctggacaatgagtctcaggagctccccaccaagcactttgagacccccgcccctgcccacaaatgataaccacctttaactgtaactttccactacctacccaaatcctataaaactgccccacccctatctccctttgctgactcctttctcagacttagcccacttgcacccgagtgaataaacagccttgttgctcacacaaagcctgttggtggtcttttcacacggacacgtgtaacactcctgacctcaagtgatctgcccaccttggcctcccaaagtgctgggattacaggcatgagccaccgcacctggcctaaaaagtcttttcaaactctagatgacagagatttcaatcttttcatttgaaatgtattactttaaaaatttatatgttttgttagggtgcaggggctcacacctgtaatcccagcattttgagaggccaaggtgcgcagatcacatatatgtgtatatacatatatatttttattggaatgtatttgggcatgtggtgtggagtagtggatccaattttatctcatccaaaaagagggccaatttttgtagcaccacttattgagagaaactgcctgatatggtttggctctgggtccccacccaaatgtaatccccaatgttggaagtggggcctggcaagaggtgattggatcatgggggtggtttctaatggtttatcaccatccccctagccctgtctcatgatagggttctcaggagaactggttgtttaaaagtgtgtagcacctccccctttgctctctctctcctgctccaccatgtaaagtcctgcctgcttcctcctcaccttccaccatgattgaaagtttcctgaggcctcccagccatgcttcctgtgcagcctgtggaattaaacctcttttcaaatttctttctaaattagagcagtgcaggaacagactaaggcactacatttgacctgctgatatgaaattctaccttattaattttttttttaattgggccaggtgcaatagctcatgcttgtaatcccagcactttgggaggctgaggtgggcagatcacaaggtcaggagttcaagaccagcatgaccaacatggtgaaaccctgtctctactaaaaatacaaaaattagctgggcgtggttgcacgcacctgtaatcccagctattcgggagggtgaggcaggagaattgcttgaacccgggaagcagaggttgcagcaagccaatattgcaccactgtactccagcctgggtgacagagagagactccatctcaaaaaacaattttttcatcattatggatacataatagttgtattcttaaattttttaaaactttgttactcctaattttatgacattaaacttttgaattattatggacacaattgtatccacctttttaaaacagtaattcttatatatacctgtatcagtttctagatccttctgtgccattcatagatttactcatgccaatcttattatattcctttgattccaatggttttatatcaaattttaatatttagttgtaaaaatataagggtagccaatgtttgttgacgattactcttatgggatctttgaggtgtcagttatcttcccctggaaatcctctgttgccagtggcaccttcacccaagttgaagaagaagaagaggagctttatttagtgttagagcagctcagaggagctgggtacggtggctcacacctgtaatcccagcactttgggaggccgaggtgtgcggatcacctgaggttgagagttcaagaccagcctgaccaacatagagaaaccccttctctactaaaaatacaaaattggccaggcatggtggcacatgcctgtcatcccagctacctgggaggctgaggcaggagaatcacttgaacccaggaggcagaggttgcggtgagctgagattgtgccattgcactccagcctgggcaacaagagcgaaattctgtctccagaaaagaaaaaaaaaaacaacagctcagaggagacccacagtgagtagctcccctctgtgggcaggcaggtcatttgtcgagtgtccagctctcagcagagaggaggcccttgggagggtagctcctctcctcaggcaagttgttcggtggtctctgcaggtctctgagggtctcagcagagacactagctcctctcttctgctagtggcactgtctgctcagctctggctgagccagggacatttagtgagcctcagagggcaggaagtgcatgccaattggcccatgggtggccatgggcgggcctggaaaaggcaccaattaccattccagttcatgggactggcagcccagccaccagccttcaggccgtccctggccagaaggaggaaccttaccagggacctacccctttccccctgggactctctcatgtctatcctgctgttcatggtgacccggcttggcctgactttgctccaagataggagggggcgtggacagcagggagaagccaggcagctggggcaggcattaaacattagccaggcacagtggtgcatgtctatagttctagctactcaggaggctgaggtaggaggactgcctgagcccagcaggctgaagctgcagtgagcagtgatcacactgaggtaggaggaataatttgactccagaggtggggctcagacctggacaaaattgaggactagctaaaacagggatggggcagaagcagctttccataagacacgcctaccagtgagccatgtcagtttaacattgccatggcaacacccaggagtttccacccctttccatggcaatgacccgatgaccaaagttaccaccattttcctacaaatttctgcataaactgccccttaatctacatgtaattaaaagtaggtataaatatgaccgcaaaactgccctgagctgctactctcagcacactgcctatgaggtttcccataggagtagtcacaaagctgtaccaccaccagagctgaaacactgcttcttcgataaagcttctttcttctaccaccagctcaccctgaattatttcctggccaaggccaaaaaccctcattggctaagtcccaatttgaagcttgcttgtcctacagcagcatgactgcactccagcctgggtgatggagtgagagcctggctcaaaaaatatactttatcaaacagaggtatattagaggtaagttaagatagaacagtttcttaattctgaaaaaaacaaaacatttgcgtaaagaacaatcttttgaataaaagtcataaaaacaggccaggcgtggtggctcatgcctgtaatcccagcactttgggaggctgaagcaggtagatcaactgaggtcaggagttcgagaccagcctgaccaacatgattaaatcccatctctacaaaaaatacaaaaattagctgggcatggtggtgggtgcctgtaatcccagctactcaggaggctgaggtaggagaattgcttgaacctgggaggtggaggttgctgtgagctgagatcatgacattgcactccagcctcagcaacagcgcatgactccgtctcaaaaaaataaaaaagaagcccaggcgtggtggctcatacctgtaatctcagcactttgggaggctgaggcaggaggatcaactgaggtcgggagttcgagaccaaactggccaacatggtgaaaccccacctctactaataatacaaaaattagccaggcatcttagcgcacacctgtaatcccagctactcgggaggctgaggcaggagaatcacttgaactcaggaagtagaagttgcaatgagccaagattatgccattgcactccagcctgggagacagagcgagtctctgtctcaaaaaaaataaataaaataaaataaaaagaatttgcatttggggaagtttgtcaaagatgttagaaggctcaaaacatttgattgaaacaggataacagctcacttgttagtaatccatgtaaatacagtgataatcaaaagtcattagtaggagtaaatagagttactaggaaaaaatgaatccttttaaagcccagagttttttgttgattctttttatttatttcaggggtagatgggggacagcgtctcactcagtggcccaggctggagtgcagcagcacaaaagttcactgcagcattgatctcccaggcctaagtgatcttcccacctcagcctccccagtagttgagactacaggcacacgttaccacacccagctaatttttgtatgtgtgtctttttttttttttttttttttaagagatgggctttcatcatgttgcccaggctggtatcgaactcctgaactcaagtgatcctcccacctcagcctctcaaagtgctgggattcaggcatgaaacaccatgcccaaccaaccaggtttttttttttaagtgataaaaaacttaataaaggcaatacaggaaattatctcgataatttcttgtaaaacctttcttagaccagctaccaaaaaggtaaagaaaaaccttctacagtgtgattatttctccttatgcaaagtgcatttagataacctggaagttggccaggcatggtggctcacacctgtaatcccagcacttgggaagccgaggcgggtggatcacttgggtcaggagttcgagaccagcctggccaacatggtgaaactctttctctactaaaaaacacaaaaattagccaggggtggtggcacacacctgtagacccagctaccaaggaggctgaggcagagaatcacttgaacccaggagacagaggttgcagagagctgagattgcgccactgaactccagcctgggtgacagagcaagaatccatctcaaaaaataaaataaaaataaaaataacctggaagttgaacgtgatgaaaagtgtgcttggatttagttaggaatatgtccaaggctatgagtgtaaaaatttaggtacatcaagaaaagccgagagtacagaatcaagttatacagagcaaatacattgcttttctaggccttcatgataaatatttcagtgtcaggccataatagccgatttagaaccaaagaaaaaacttacaggagcagacaaaaaagttggagacagtcatcatcccagaccttctcaatgtgaaaaaaagaaggcaatgatgtatgacctgcaaatgacatacactgagatgcaagtaaagttgagcctctgagacatgaatgagaaatctgaaaaaacaaaactctacctcaacaaattggctggttttggttttggtggctcgttcctgtaatctcagcactttggaaggatgaggcaggagagtaacttaaggccaggagtttgagaccagcctgggcaacatagctagatgccatctttattagtctgttctcgcattgttataaagaaataactaacagtgggtaatttataaagaaaaaaggtttaattggctcacagttctgcaggctggacaggatgtatgttgctggcatctgcttggcttctggggaggcctcaggaaacttacaatcatagcagaatgcagaggaccaggcatgtcacatggccgaagcaggagcaggagagagggggaggtgctactcacctttaaacgaccaaatcgagtgacaagaactcactcactatctatcacgaggacagtaccgaggcaggtagtgctaaatcactcatgagaaatccaccccgccatgatcaagtcacctcccaccaggaacaacctgtaacattgggaattacagctgaacatgagatttgggtggggacacatatccaaaccacatcatcatctctacaaatttttttaactgtatgaaattccacctcaataaataaaattactgttttaaatgatgaggacagcatttaaaacctgaaaactacagaaattaaatcgatctcaggaaaaaatgtggccgaaatagaaactagagtttagaagatggctactaacagattttagaacgaacaaacaaaacgtcttgcaaatttattaagtgcagataaatatgtcaaaaaaaaacacaccttcttgttttcaatatagaggaccagattctggtcctgtatcagtgcacccaacaccactgtttaatttttaggaaaaaaatatcctatgtacaatttcttttcaatcctagccaacacaatcatacaataaactgtcggtaaggcttatcttttataaatcctattcaaattgtttagacgtttaatcattttcttaaaccttcagtcttagacttacagttttctccttttatattggtacaaccaatcattttaccttaggacaaaaatttaccacataagattctcacacaaaaattactttttcctaaatttgtatttggagtaatagaccaaaatatatctactctttttagaaattttaagaagccagctgggcacggtggctcatgcctgtaatcccagcactttgagaggtgaaggcaggtgaatcacctgaggtcagcaattcaagaccagcctggccaacatggtgaaaccccatctctactaataatacaaaaattagcctgtcatggttgtgggcacctgtaaacccagctactcgggaggctgaggcagaattgcttgaacctgggaggcagagggtgcaattagctgagattacaccattgcactccagctgggtgatgagtgaaactccgtctcaaaaaaaaaagaaagaaattttaagaagccaagaatgaatatatattttttcagtaatttgtttgccttatatcttatttggatatgacccagataattaatattatttaagattttaaattacatgaaaagtttatttataaacatttattccatttacagttacctttaatttctaattacacctagattacttattaagatttgacacagctagtcattgttttaaattattttttattaaccaattttatatcctgttaatattgtttaccaaagttcaaaccctacactaaatacatggttattctgtcaataactcagaagatatagctattgttattaaatcaaaaatattaagtaaatctcacttataaaagaattgcacaaagatcattgttttagattgggtttagcttcatgaacttaaagtatctaatagagacagacacaacactgtcagaccagtaaacccagacaaaaatatatgctgacaattttgaagacatatctaattttatcgacaactttaaaaccaattaatttataaaagaattgtcatgtgaacttaaaaaaaattgtgttcatttttttatgaacacattttttttgatctgccctcctcggcctcccaaagtgctgggattacaggcaggagccaccatgcccagcctgatttctgtagttttatagtaacttttgacatcaggaagcatgagttgctcttttttaaaattgtttttaatactggggctccagttatgtgtgggctttcataacctaatttcagaactggcttaccagaacttctgccatattctggtggttacacatatcaatcatagtacagtatgagaggattacacaagggtagtcctcaaataccaggaagcagaaactggaggccaatttggaggctgcctagcacagagaatttgtcaatgtctaatatactacctatttaatccagcaatcctaattctaggaatttgtcctgaatgtaaatgcctaaatatacaaaaatacacatgctcaagaatactaactgcatccctgttagtaattgcaaatttgaattctctaattgatgacatgtagtagagcagctgaatattacatggtacatccacaaaaggagtattatgcagctacagaatgaaggtgaaaaaggaagatatatctatgaatttatatggagtggttatcaagatacactgttaggcaaaaatagaaactgcaagagtatagtatgaaactttttttttttggagacggagtctcactctgttgcccaggctggagtgcagtggcgccatctcggctcactgcaagctctgcctcccgggttcatgccattctcctgcctcagcctcccgagtagctgggactacaggcgcccaccaccacgcctggcaaattttttgtagttttagtagacagggggtttcatcgtgttacccaggatggtctcgatctcctgaccttgtgatctacccgcctcagcctcccaaagtgctgggattagaggcgtgagccaccgtacctgcctgaaatctttttttaaatgggcaataacaaatatatatatgttcatttttgctagaagaaaacacaggattattcagagaaaaaggttcattacctatagctgatgggataggaacaggttgtaaaggacagtgagattagaacagactggaaaggataaggcaagaaaaacgtttatgtttagttctaatgtttaaagtatgcaattaggtgggcgttgtggctaatgcctgttacaccagcactttaggaggccaggatgggaggatcccttaagaccaggagtttgaggccagcctgggcaacattgccacatcctgtctctacaaaaatttaaaattagccagtcctggtggtgcacgctggtagtcctacctactcaggaggctgagggagaaggactgcttgatctcagaagtgtgaggctgcagggagctatgactgcaccactgcactccaacctgggtgacagagcaacaccctgtctcaaaaaaaaataagggtaaaaaatttaaaaactgcctgcacctggtggtgcatgcctgtactcccagcctcttgagacactaaagtgggaggagtgcttgagctcaggagcataaggctgcagtgaggtacaatcatgccactgctctccagtctaggtgacacagcaagatcctgactcaaaaaaaaaaaaaaagataaaccagtataaaataaaacatactattgtttcacatattaatttttttgggacagtctcactctctaacaggctggagtacagtggcacaatctcagctcactgcaacctccacccccaaggttcaagcgattcttctgcctcagcctcccaagtagctggtattacaggtgggtgtcatgacgcctaatttttttctttgagacagtcacgctctgtcacttaggctggagtgcagtggtgcaatcttgactcactgcaacctctgcctctggggttcaagcaattctcctgcatcagcctccccagtaactggaactacaggcacccaccaccacggccggctaatttttctatttttagtggacacggggtttccctatgttggccaggctgatcttgaactcctgacctcatgatctgcccacttaggcatgagccaccacacccagccttttatttattttttttgagacagagtctcactctgtcacccatgctggagtgcagtggcacgatctcggctcactgcaacctccgcctcccgggttcaagtgattctcctgcctcatcctcctgagtagctgggactataggcgcctgccaccatacccagctaatttttgtatttttagtagagatggggtttcaccatattggccaggctggtcttgaactcctgaccttgtgatctgcctgcctcggcctcccaaagtgctgggataacaggcatgagccacggcacccagccgcctggctaatttttgtatttacggtagagacagggtttcaccatgttggccaggctggtctccaactcccagtctcaggtgatccgcccacctcggcttcccaaagtactgggattacaggcataagccaccatgcctggcctgttttacatatctaatttaaaaaaaaatcgacaaggataacggtgtgacacaaaatggaaaattaacaggaattactgaaatgaactttgtatcaaatggataaaaattcaacaatgaagaggggggtaaaaagcacaaaattgacccaagtaacttcttttattacaatttttattgtgataaaaacacataaaatttaccctttcacatactttgtgtgtaccgaagagtattgttaactataggcatatttttatacaacaaatctcaaaaagcttttccatcttgcgtggctgacactcaatacccattgaacaactcattttctcctccaccagcttgtggcaaataccgcagtactttgttcttctgagtttgacgttagataccccatataagtggaaatgggtgtatttgtcctttcggaactggtttatttcacttagcataacgtccatgttgtagcatatggcagaattttgtttttaaggctaaatgatattgcattgtatgtatataatgcattttgtttaccaattcatctgtcaatggacatttactttgcttccacctcttggctcttctgaataatgctgcaatgaacacaggtaggcattcacacattgagatgctttcttcagttcctttggacatgtacctagaagtggattgctgctgaccaagtaagttttaaacctagtgcttttatattacgccctgagctaaagataagaactgtgaataaaaactgaattctggttagttgatttttaaaaagagtggtatgagttatcaattctgagagtagcttatattttaatctaggattgagcacgtgctatttttgcaagtgatgaaagatagctacagacaagggaatttggaaagcaagaaataacccagcagtgctgcagtggaattaaaagtgttggcttgtggtcatgtttttaatatagaaatagagttattaatgtgtggatacgtatatataattttgtatgtctttgccatatcctccatagagaagacctaaaagccagggcactattacctaggaacacctccctacacagagactgcagcttctaaatagtattctccattaaaataaattacatttttctgagtctagggctggagacaaatgtaccatgaacaaactgttgcccagaaaataattatatacccatgaaataaggagaatacatttttaaagattcagaagatagcttgatggggatcctacttattgaatctggaaaaatatgtgcatcaaatttacagtagctaactacaccccatagattaagaatttatgatacatgctcctacaagtaaatgggtaaataaatgaataaggataactcttccttacaaaattccagttaagaaatgtagaagaaactatggaattagaaaatcactttttggactgggtgtggtggctcacacctgtaatcctggcactttgggaggctgaggcaggaggactgcttgagcccaagagcttgagaccagtctgggcaacatagtgagacctcggctctacgaataaaaaaattaagtgggtgcgttagcatgtgcctgtggtcccaggtactcaggagactcaggtgggaggatcgcttgagcccaggaggtcaaggctatagtgaggcatgatcatgccaccgcactccacaccctaggcaacagagcaagaccccaatgcagaccaaaaagaaaaaaaaaaaaaaggaaaagaaaaccaccatttggaaaccactacagcaacagctacagacatacctcatgttacttcactttgcttcatctcactttacagatatttttcacaagtagaagtcctgtggcaatgtcatgtcgaataaatctataacaccattttttccaacagcatgtgcttactttgtctctcacatcctgacaattctgacaatatttcaaacattttccttattattatacttactgtggtgctgtgtgatttttttttttttttttttttgagaaggaatctcactctgtcacctgggctggagtgcagtggtgtgatctcagctcactctaacctccacctcctggattcaagtgattctcctgcctcagcctcctgaatagctgggactataggtgcctgccaccatgcccggctaattttttgtatttttagtagagacggggtttcaccatggtggccaggctggtctcgaactcctgacctcatgattcactcacctcagcctctcaaggtgctgggattacaggtgtgagccaccgtgcccggctgctctgtgatctttgatgttcctattttaattgttttggggtaccacaaaccacaaccttcgaagacagcaaacttaacaaatgctatgttctcactgctccaccaactggccactctcccctctctcctcctcttcccaggcctcctaattccctgagggacaatattgaaattaggccaattcattaccccacaatggcctctaactgttcaagtgaaagaaggagttgcaaatttctcactttagatcaaaagctggaaatgattaacctcagtgagaaagtcatgtcaaaagccaagataagagccaggtgcagtggctcacacctgtaatcccagagtgttgggaggcagataggggagcatcacttgaggttttaagttcaagatcagccgggtaaacagtaaagtcctgcctctttaaaaaaaaaaaaaaaaaaaaaaaaaaattagctggccatggtggtgcacacctgcagtctttagctactcaggagacaggaagatcactggaacccgtaagtttgaggctgcaatgggctataactgtactacactccagcctgggcaaaagggagaccatgtctcaaaaaaaaaaaaaaaaaaaaaactgggataggccaaaatctaggcctcttgtgccagttagccaagttgtgaatgtaaagttcttgaaggaaactaaaagtgctactccagtgaacacacacataataagaaaggaaaacagcctcaccactaacacggaataagttttagtggtctggatagaagatcagaccagccacaacattcccttaagccaaaacctaatccagagcaaggccctaactctaattctatgaaggctgagaggtgagttagctgcagaagaaatgctggaagctggcaaagatcagttcgtgaggtttaacaagtcatttccataacataaaagtacaaagtgaagtagcaattgctgatgtggaatctgcagcaagcatttccagaatatctagataaatggcagaggtagctctactagagttttaacagagacaaaacagccttacttcaggagatgccatttaggactttcacagctctaggtaagctaatatctgacttcaaagattcaaaggacgggctgactctttactttgtagagacagcgtcacgctctgttgtgctggctggtcttgaactcttgacctcaagtgatcctccaacctcagcctcccaaagcactggaattacaggtgtaagccacttttcccagcctgggctggctttcttgttagaggtcaatgcagttggtgactttaaatgaatgctaatattcaattaccattccaaaaatccaagagccagttaagaattatgctacatctactcttcctgtggtatctatttacatctatttacagcatggtttactgaatattttaagcccactgtaaaacatactgttcagagattcctttcaaaatattaccactgataatgaacctactaaccaagagctcttatggaggtataaacaagattggcgttttcatgtctgctaaccgcagcccatggattctggaataattctgactttcaagtcttattatttaagaaatacatttcataaggctatagctgccactaataatgcttcttctgagggatctggataaattaagttgcagaccttgcagaaaggattctccattctagatgccattaacaacatttatgattcatggaaggaggtcaaaatatcaacattaaggcaggtgtggtggtgtgtgcctggagtcttggctactcaggaggcataggaaggaggatcacttgaggccaggagttcaaggctacagtgtgctctcatcgtgctggtgaatacccacttgtactccagcatgaacaacacagcgagaccttgtctctaaaaaaaatttttttaattaaaaaaataaaaaccaacattaaccagagtttggaagaagttgattccaaccttcataggtgactctgaggggttcaagtcttcagtggaaaaagtaactgtggatgtgatggaaaaaagagaactagaattagaagtggagcctgaagatgtgacagaattgtttcaatctcgtgaaaaaacttgaacagatgagaggctgctttgtatagataagcaaagaaagtggtttcctgaaatgaaatctactcctgaagatgctgtgaacattgttgaaaagacaacagacttagaatattacatcaacttagttgatcaagcagtggcgaagtttgagaggattaagtccaattctaaaagaagttccactatgcgtaaaatgttatcaaacagcgtcgaatgctaaagagaagtttttcatgtaatgaagagtcaatcaatgcagcaatcttcactgctgtcttattttaagaaactgccacagccaccctgatcaacagccatcaacactgaggcaagacctaccacaagcaaaaagattacaactcaccaaagtctcacatgatcattagcactttttggcaataaagtattttaaactaaggtactttacttagacataacacaactgcacacaagagactaccatatgatgtaaacctaacttatatgcactgggaaaccaaaacatttgtatgattcatgttattgtgatattcactttatagtggtagtctggaacaaaactcacaatatctacagggcatgcctgtatcttgtatcaatagggtttctcttctccattgcaacatcttatatacttagaaaggcctaaggaaataatgagggctttctgtgttttctacattgtatggccccatggtgagttctcaaatgttggattgtgaccacaatccaatcccttgagaaaagaatgtgtattaacaacgacttacaaaaaaaaaaaaaaaaaaaaaaaaaaaaaaaaaaggccaggagcagtggctcactcctataatcccagcactttgggaggccaaggcgggtggatcacctgaggtcaggagctcgagaccagcctggccaacatggtgaaaccccatctctactaaaaatacaaaaattagctgggtgtggttgacggcacctgtaatccaagctacttgaaggctgaggcagaatcgcctgaacccaggagacaaaggttgcagtgagctgggatcatgccattgcactccagcctgtgtgatgacaacagcaaaactctgtctcaaataaaataaaataaaataaaataaaataaaataaaataaaataaaataataaaaaaagattccattggctccctaacattcctaaaatttataggggacacatagagtatgagttctttcatgtcttcgaagtgaatggggataactgaaggcctcctcacattctttgtaccaataaaatttctcttcagtgtgaattcaaatgtggtaattatggtatgagaaattcctaaaagatttccacattccttacattcagagtttttcttcagtgtgtttttaaatgtttagtaagtaaataaaatctattgtaggctttcccacattcgttacatatatagggtttctctccagtgtgaattctaacatgtttctgtagatgtgaagaagcacggaaggttttcccacattccttacatatatacggtttctctccagtgtgagttcttatatgttcaatgagttgtgaagatgtagcaaaggctttcccacagtccttacattcatagggcttctctccagtatggatttttacatgattatgtaagcttgaggaaacagtgaatgctttcccacactccttacatttatagggttttattccagtgtgaattctaaagtgattcttaaggcatgaagagcttctgaaggattttccacataccttacattcaaagggcttctcctctgtgtgagttttaaaatgttcagttagtagataaaacctattgtaggctttcccacattcgttacattcatagggcttctctccagtgtgtattcgtacatgtttagtaaggcctgagcgcccagcgaaggctcttccacattccttacattgataaggtttctctccagtatgaattcttacatgttcaactaggtgtgaagaaacagtgaagcatttcccacattccttacattcatagggtttctccccagtatgggttcgcatgtgactattaagatatgaagaatatctaaagaattttccacattccttacattcgtagggtttttctacagtatgcattttaacagacacagcatggcttgtggagtaagtaaaagctctcccacattgcttctgttcatagagtgtttctccattgtgagttatcctatttgcctgaagatgtgactgatcaacaaaggcttcctcacagtcactgtattcaaaggatttgtctcctatccacgttctctggtgaacatttggtggcaggctgaaggcttttctgcactgattcaacacagaaagtgtctctccagcaggggcactgttgtgtaacatgggaaagttttctccatactcatcacagtcataagtgtcccctgtattttcagttcccatgtgtgcattaaggcatgagtgttcactgaagatttctccattttccataaagtcacagagttcccctccattgtggatttctgcctgttaataaagggatgaatgatgattaaaggatttttcagatttatcaacagattttacccatctgaaatcagacagtttattatgattataatttttgccattttcattacatgcatacagttgctgccccatgtatttcttacaagttgaatgaagaaaacctactggcaagaaccctgtgccatttgctctaagaaccttgaaataattcctgtatattttcatgaaattgtttttataatctagctacatatgtgataatttgtacttgtgagaatgctgaagcaccaagttttaagataggattaaggtatccccaaatgcattacatttagagtatccctctagagcagaggtccccaacctttttgctaccagagactgatttcgtagatgacaatttttccacaaacaggggtggaataggggtgggatagggatggtttcagcatgattcaacaacattacatttactgtgactttatttctattattattacattgtaatatataatgaaataattatacaactcaccataaaataggatcagcaggaggcctgagcttgttttcctgcaactagacagtcccatctaggtgatgggagacagtgacagatcatcagtctcataaggagcacacaatctagaaccctcgcatgggtggttcacagtaaggtttgtgcttctatgacaatcgaatgctgctactgacaggtggagtatatgacaggcagtaatacaagcgatggggaatggctatacacacagatgaagtttcgttcatctgccacttacctcctgctgtgcagcccagttcctaacactaacagaaacagtaccagtggggacccttgctctagagacattcctcctgcttgagtaaatgttacctctctcaaatatctctcatttttgctgattttttataattgaatcccaatctttttttgagtgtggtaaataagaaatcttaatcttaccatttgtatgccgtttgatgttttgttaagccaaaaaaaaatgttgttgaggtgctgacactttggttttaacttgccattctgaagtaaaacagaaaaaaagaaaaaaaaatagggtctgagaacaaaacagtaggttaaataagtcagaattataaagctcatttttatttgtcatattcagcacactcaaaaaaattaaacagacatagatttgaacagtttatccatgacgaacatttggcaatcgtaaggacttggggtctaaacttagtaattttttttttttttgagacagagtctcgctctgtcacccagactggagtgctggagtgcagtggcatgatctcggctcactgcaacctccacctcctgggttcaagcgattctcctgcctcagcctccgagtagcttggattacaggtgcccaccaccaggcccggctaatttttgtatttttagtagagacggggtttctccatgttggccaggctggtctcaactcctgacctcaaaagatccacccgcctcagcctcccaaagtgctgggattacaggcataagccaccatgcccagcaatttagtaattttttaaacaatttattctatagaaattaaatgagataatgaacagaaatagtattagggaaggaaaatagaaatgatctggataaagagcacacattaaagtcataaacaaaaagataaaagagcactcatttgcaaaatcacatgaaagtctgggttagatgaaaaagagaggaatatggaaagttgaagataccctaaaacttccaagtccaatggccccatgttctgtgacaaagtacatcttttaaatatatcttcattatgcttccaaacatactgaacttctcattgaccaggagtgttcttcatactcaccttggggaactccggttggcaatgtgctcaacttttccttctcctcctccagtcaagagacagactgagtttgaataggtcctgtacagagggaaagatacatcaatggaagaggcttatgaaggaaatgacaaacgtaaccaagaaaaaaacaactatattcctaaagagagtagtgaaactattttaaaagagctcaaatttcatatatctcatccttttgtgccctgaggagttggttatctctgaccaaatacccactattcagacttaaatacacatttaaaaaccattaaagactgggcgcagtggctcatgcctgtaatcccagaactttgggaggctgaggtgggagaatcacctgagcctggggaggttgaggctgcagtgagtcatgattgcaccactgtactccaacctaggtgacaaagtgagaccctgtcttaaaaaaaataaaataaaaaccattaaaacgtgtattcaaataggaaataatccaagtgcaaagagagatcattattttgttttctggttttgtttttttttttgagacagagtctcactctgtcacccaggctggagtgcaatggcactgtctcaactcactgcaacctccacctcccaggttcaagtgattctcctgcctcagcctcgtgagcagctggggttacaggcacccaccatcaggtctggctaatttttttgtatttttatagagacagggtttcaccacattggccaggcttgtcttgaactcccgacctcaggtgatccgcccacctcagcctcccaaagtgctgggattgcaggtgtgagccaccacgcctggccgagatctttttttttttttttttttttacgatatcgtcaaaagctcgaatattgtgtcttttgtagcttttcttatatcatgggtagtattacatctctctctctctctcttttttttctttttgagagatttttgctctgtcccccaggctggagtgtagtggcacaatcttcgctcactacaacctctgccgccgcccaccctagttcaagcaatacaaaaattagcagggcgtggtggcacgtgcctgtagtcccaaccactcaggaggctgaggcaggagaatcgcttttactcaggaagcagaggctgcagtgagccgagatcatgccactgcactccaggctgggcaacagagcaagattccatccaaaaacaaaagaatcagagagcttctttaggacacccctgaaataaagttatttcttatgttctcagggctgaaattgttataattaatgaggctcatatgccagagcttccctggcataatgtgaaggagggaatcctagagagacaggagtgttgcactggatttactatgtgtcatctgtatagcccactcccccgccctttgttgacagagcagaagacactctcttcacaaaggttattaagagagtagtggcgggagtgtcgtaatccttgaaaagctctgttggtattctccttcataggacaggtatgactgcaaagaataccatcactgagatgagttccctgggtttttttgtttgtttgtttgtttttgagacggagttttgctcttgttgcccaggatggagtgcaatgacgcagtctaggctcactgcaacctccgcctcctgggttaaagcgattctcctgcctgagcctcccaagtagctgggattacaggcacctgccaccacacttggctaattttttgcgaggggggggggtatttttagtacagacggggtttaaccatattggccaggatggtctagaactcctggcctcaggtgatctgcccgcctcagcctcccaaagtgctgggattacaggcgtgagccaccgcacccagccgagttccctgctttcaatcgagatgaaggggacccagaatagcagaaatcaagaaggtagtatttaatcaccaaacacaaggtgagaaaatcaactatcaaggacagtggaaatgtaccagtaatcagaatgccctgacctacagagatctgtggtggtggctaactgatcgtgctgtccctagaaatgaaatagataagcagttaacaaagcctactctaaagagccacaaaatatatgttaggcattatgggccacatggtctctgttgcagctactcaactctgctgttgtagcatggaaaataccatagaaaatgtaaacaaatgaacacggttgtgttctgattaaactttatatacaaaaaacacatggagagacagatatggcccatgggccatagtgtaccaatctctgtacttgaatactgctccatctatgtaaaaagtctaaactatagtagccaaaaactggatttatcccagtggagaatcataacctgtcactcaattaccacactgaaatcattcataaatcatgaacttaggtgatcactccaattaccgccatttttcaaaatgtaatgcctttactagataaatcaacataatttctgtcacttggtatgcaggcattgacatagctaatgtcttttctccataccaatttgaaaaaaacaagacttggttacctttcacctggcaggaccaacaatgtatcttcataacattgcccctagaatgtgtcagttctcgaggtctctgtcgtaacttaatccccagagaaaatgacattccatgaaacaccacactagtacactatgttgacaccattatactgatcatatccaatgaataggaagtagaaaacacatttttaaaaattagagacagggtcttactctgtcacccaggctggattagagtggcatgatcatagctcactacaacttcaaacttcaaactcccgggctcaagcaatcctcctgcctcagcctcccgagtatgtgggactataggcacatactaccatgcctggctaattgtttttctttttctttttactatagacatgaggtttcactacgttgcccaggctagtctcaaacacctggtctcaagcaatcctcccacgtcagcctcccagtgttaggattacgggcatgaatcattgtgccctgcctgaaaataccttagacaactttattagaagcatgcagcatttacggttccaaaatggtagtacagaagcaagctggtttcaatcccctgacagaaaactacaaccaaatgcatattgtgaaaattatcaccagcaatatccctgatctaaaatataaaaattaggcagtttctggggctacaaagaagtgaaaaaactccaagggagacgttaagagaatcaagtttccaagaatgtggaaaatttctaccaattcacagtttctacactggaaaaaactgagatcaatgtggacaaccaccttctccatcatcctgggttccctggtaaaagatcagtccctccctgtctcaacccacaggaagcattacaaatgcctgaagggagaaacatccctgaggacatccagggacaaagatgggaggcaggactaccatcccagccctggaaactctgttttataacttggccaaaggagaagccaagtcagagtggctgttcaggagcaccatactgtaggggtacgctacacaggtcacctgggcatgaacacacagccagccttcccacagtgctggaatatgccctttaggactccctcattctgaatgggcagtattcttgatagtttgctatagcaaaggcaaacgtgggtttaagattccatctagtgctgaaaacgaggcagtgacctagggaaattttaaagaaagaaaatcactttcggaggctgagacaggcagatcgcttaagctcgagttcaagaccagcaacaagatgaaaacccatctctactaaaaagtacaaaaagtagccaggtgtggtggcgtgcacctcacctactcaggaggctgaggtgggaggattgcttcagcctgggaggtagaggctgcagtaagccatggtcacaccacggcactgcaacctgggtgacagagagagaccttgtctcaaaacaacaacaaaaaagataaaaagaaaacatacccaataaaaaccacaagccagacaaagactgtaataaataactaatccttcaatgcacagacacagatgtacatccacaagaaacaacagcaaatggggaaccacgacctcctaaaatggacgaaaatagtatcagtgactgaacctaatgaaatgacaatatgtgagctccctaagaattcaaaataacagttttaaggaaattcagtgatctccaaaataacacagaagagcaactcagaaatgtatcagaaaaaactttagaatatattaacaacaacaaaaaagagaaatcttacaactgagaaatactcaactcaaaagttcacggtagaggctctcaacagcaagatggatcagaggaaagattcactgagcttgaagaaaagctatttgaaaatatagccagaagagaagaatgaaaaggaactaagattgtcggcaagatgcagaaaattaccttgaaagaccaaacctaggaatcactggtgttcaagagggaatgcagcaagtgcaaggggtaagctttgaaagctttattaaggaaataacaagattccaaaaattgagaaaaatataaatatccaggtacaggaaggtaagatgacaccaaacagattcaatccaaatgagactactacaaagcatacaatcttcagactctcaaaggtcaaggacaaagacaggaccttaaaagcattaagagaaaagaagcaaataacatgaaggactccagctggtctggcaacaggatttctcaagggaaaccacacacaggccagaagggagtaggatgacattttctttctttttttgtgagacggtctcactccgttgcccaggctggagtaccgtggcacaatcatggctcaatgcagcctttatctcccaggatcaagccatactctcacatcagcctcccaagtaactgttactacaaatgtgcaccacaatgcctggctaatttttctttctttcttttttttttttttttgtagagacggggcttcaccatgtttgaaatgcttgtttcccggtgccgtaaagaaatagcacttgaacataaattttatttctttagcaaggccattttaatttatttatacatttttttgagacagagtctcattctgtcgcccaggctgcagtgcaatggcgcgatctcggctcactgcaacctccgcctcccaggttcaagcgattctcctgcctcagcctccctagtacctgggattacaggcacattccaacatgcccggctcattttttgtattttttgtttttttagtagagacaggttttcatcgtgttagtcaggatggtctcaatctcctgatcccgtgatctgcccgccttggcctcccaaagtgctaggattacaggcacaagccaccgcgcccggccctagcaaggccatttttacactttctgcagaaagggtacactccccagcagatttgccatgagagtacaccgaacaaaggagacaggttcatttataacctgacgcatccaccctactgctgtgtccagtttccactggctggaatggaacctcacattttgtacttgttttgattggcttagaactttttaaaaggcgtaaaggcagaggagaagaaaggaaggaggaagtaacttgtggaatgctgagaaaggcaaaaacatcttcaaataaggaataggaacaggctatgacctaatgcttgcttggaccagtataagcatgccagggcaaatatttaggctaaattgtgggagctaagaacataaagtacattgatttctttattacagctagcagatatttaagtatgttaacacaggtctttgaataagttttgcttctaaaaagaagttatttattcctcattagatggaaaaaaaaaagtctttaaagaaaaatgtctactttactttttacaaccaagttgcccaggctggtctcaaagtcctgagctcaagcaatccaccaggctcagcctcacaaagtgctggaattacaggcatgggccaccttgcttagctatgggatgaaattttcaaagtgctggaagaaaaaaattgatatctaagaataccgtattcaggtcagcacaatgtctcatgcctgaaatcacaacactttgggaggctgaggtgggcggatcacctgacatcacgagttagagaccagcgtggtcaacatggtgaaacccagtctctactaaaaattaaaaaaaaattagcctggtatggtggcacatgcctgtagtcccagctacactggaggctgaggcaggagaatcacttgaacccaggaagcggaggttgcagttagccgatattgtgccactgtactccagcctgggcaacagagcaagatttcatttcaaaaaaacaaaaacaaaaagagataaagaaggtctctatagctgggagtagtggctcacacctgtaatcccagcactctgggaaggctgagatgggcagatcacgaggtcagaagttcaagaccagcctggccaacatggcaaaactccatctctactaaaaatacaaaaattagccgggtgtggtggtgtgtgcctgtaataccagctactcacgaggctgaggcaggagaattgcttaaacctgggagatggaggttgcagtgagctgagatcacaccactgcactccagcctgggcaacagagcaagactctgtctcaaaaataaaaaaaaaagaaggtcactatataatgataaaggggtcaattcagcaggaggatataacaactgtcaatatttatgcacccaacactggagcacctaagtatataaagcaaacattaataaatctaaagggagatacacactgcagtgcagtaataatagtaggggatttcaacaccccactctcggtaatggacagatcatccagctagaaaatcaacaaagaaacacagaagaagttaagcaataaactaaaccaaaaaggcctaacacaggacattttatccaactgctacagaagatacattcctttcctcagcatatggaatattctccagaacaggccatatcttaggccacaaaaaaaagtcacaacaaattcaaaaatgtagaaatcatatcatcttttctgaccacaagggaataaaactagaaatcactaacaagaggaaccttgattcacaggctcaaagtggtggctcatgcctataatcccggcactttgggaggccaacatggggagactgcttgcacccaggactttgagaccaccctgggcaacacaaggagaccctgtcccttcaaaaaaaaaaaaaattacacaacggaacattgttttggtacgttgacatatcaaaatccatggtacaaaagcacacagaaatttggaaattaaaatatttcttgaaacaaattaaagtgaaactacaacataccaaaatctatgggataaaagcagtactaagggagtattttacagcaataaacacgtacatacaaaaagtagaaagatttaaaataaccgaatgatacccttaagatactagaaaagcaaaaacaaatcagactcacaattaaatcaaaaggataaagaccacagccaaaataaacaaaattgagaataaaaaacaatacagaatattaataaaacataaagttgattacttgaaaagataaacaaaatcaaccaacctttggctagactaaggggaaaaaaaggacccaaataaaataaaaaatgaaaaaagaaaacagaacagaaaccacagaaatacaaccaatcattagaaactattacaaaaaactatatgccaacaaattgataagcctggaagaaatggacaaattattgggcgcatacaacctaccatgattgaaccatgaacaaacagaaaacctcaacacaccaataacaagattgaagccgtaacaaaatgaatcccatcaaagaaaagcccagaaactgatggcttcactgctaaatcctaccaaaaactgaaagaataacaatacaactcgaattcctcaaaaaaaattgaagagaagagaatatttccaaacttggtctacaaagtgagcattattctcatatcaaaagcagagaagagcacaacagcaacaaaactacaggccaggctgggtgcagtggctcacgcccgtaattccagcactttgggaggctgaggcgggtggatcaccttaagttaggagtttgagaccagcctggccaatatggtgaaatcctgtctctactaaaaaaaaacacaaaagttagctgggagtggaggcatgtgcgcctgtagtccctgctactaaggaggctgaggcaggagaatcacttgaacccgggaggcggaggttgccgtgagccaagactgagccattgcacttcagcctgggcaacagagcaagactccgtctcaaaaaagaaaaataaagaaaaagaaaaaaaaaagtaaccaaaaatgtgaaggagctatgcaaggaaaactataaaacactgatgaaacaaactgtagaggatacagaaaaaaaatgggaagatattccatgctcatggattagaatattgttaaaatgacaatactacccaaagcaatttacaattcagggcaacccttctcaaaataccagtgaaattcgtcacaaaaagagaaaaaaaatcctaaaatgtatatgcaatcacaaaagacctcaaacagccaaagaaatactgaccaaaaaaaacgaagctggagtggccaggtgcagtggctcacacctgtaatcccagcactttgggaggccgaggcaggtggatcattaggtcaggagttcaagaccagcctggccaacatgatgaaaccccgtctctactaaaaatacaaaaattagccagctgtgggccgggcgtggtggctcacgcctgtaatcccagcactctgggaggccaaggtgggcagaccacgaggtcaggagatcaagaccatcccggctaacatggtgaaatcccatctctactaaaaaaaaaaatacaaaaaaaaaaaaaaattagcctggcgtggtgcctgtagtcccagtggtgggtgcctgtagtcccagctactcagaaggctgaggcaggagaatggtgtgaacccaagaggtggaacttgcagtgagccggaacttgcagtgagcccagatcacaccactgcattccagcctgagtgacagaacgagactccacctcaaaaaattagccagacatggtggtgcgtgcctgtagtcccagctactagggaggctgaggcaggagaattccttgaacctgggagacagaggttgcagtgagccgaggtcgcaccactgcactccagcctgggagacagagcgagacttagtctcaaaaaaaaaaagaaggaaagaaaaagctggaagcatcaaactgcctgatatcaaaatattctacaaagctaccatagccaaatcagcatggtactgacataaaaacaaacacatagatctatggaagagaacagagaacctaaatataaatctacacatttatagacagttcattttcaacaaaggcaccaaaagcatacaatgggaaaatagcagtcttcaataagtgctgctgggaaaactgaataacgatatgcagaatgaactagatgccatctctcagcataaacaaaatcaaaacagattaaagacatctaacacctgaaactataaagctactagaggaagaaactggggaaacaatccaggacattggtctgggtaaagatttcttgggtaagacctcaacagcacaggcaacaggagcaaaaataaacatatgagattacatcaaactaaaaacttctccacagcaaaacaatcaacaaactgaagagacaatctagagtatgggaaaaaaatatttacaaactatccacctgacaaagattagtaatcaaaatatataaggaactcaacttgatagcaaaaaaaaaaaaaaaaaaaatccgatcaaaaaattggccaaaggtcagaatacttgtttctcaaaaaacgacatacaaatggccaacaggtatacggaaaaaatgctcaacatggctaaacatcaaagaaatacaaatcacacattaccacaatgagatgtcatctcacctcatagggtggcttttatagacagggaataacaaatactgatgaggatgtggtgaaaagataatccttgtatgcagttgatgggaatgtaaattagtacagccactatagagaacaatactcaggtgtagtggctcatgcctgtaatcccaaaacttgaggctgtggtgggaggatcacttgagcccagaagttcgagccagcctggacaacacaggaagacctgtctgcacacatatgcacacataaaacctgtcagtcacagtggctcatgcctgtaatcccagctctttaggagcccaaggcaggtgaatcacttgaggtcaggagttcgagaccagcctggccaacatggcgaaactccatctctactgaaaatacaaaaattagctgggaattgtggcgtgcgcctgtagtcccaggcaggagaatcacttgaacccaggaggtggaggttacagtgagccgagatcatgccactgcattccagcctgggcaacagtgagactccgtctctagaaaaaaaagagaggttgattcatgggtaaaatacacagttagaagaaataagaactagtgttcaatagatcagtagggtgactacatttaacactcatctattgtacatttcaaaacagctaagagaataacttgattttcctgcaataaagaaaggataaatatttaaggtgacagatattctacttaccctgatttgataatataaatgcatcaaattatcacatgtactcagaaaacatgtacgtctattatgaatcaaaaaactttttttgaattttcaaatagagggtgggagattctggggccaccatgtctgtgggtaaagatattcccttgtcagccaggcgcgggtggctcacacctgttatcccagcactttgggaggctgagacgggcggatcacgacgtcaggagattgagaccatcctggctaacacggtgaaacctcgtcaatactaaaaatacaaaaaattagccgggcgtgttggcgggcacctgtagtcccagctactcaggaggctgaggcaggagaatggcgtgaactcgggaggcagagtttgcagtaagcccagtttgtgccactgcactccagcctgggtgacagagaaaaactagtctcaaaaagaaaaaaagaaaaaaaaaaagatagatattcccttgtctggatcatgtaaagacattccctacaaaaagacattccctgcaagatgtccctccaagttacttcacctaataccacctaccactaaaaacgagcaatgagccatgattatgccattgccctccagcctgggtgatccagcaagactcaaaaaagaaaaaaaaaaaaactcagtatgggggtttctcaaaaaactaaaaatagaactgtcaatagagctaccacccgtaaacctcttgaattttggaggcaacatatacatttgtatgtgctttaacgccccacacagttgcctgtaaggattctagtttcaactgtagacaagagcaatttcaggctgcactgcaggcttcccaagcacttggtccacctgatccagcagacccaatgatactcaacgtgtccatgttaaatggcatcctatttattggaagcctctggcatacaccaacagaagatgtagagtagaggcctctggtattccatagtcaatccatgccctcttgtgcagattaactgtttctcttttgagaaacaggttgtggtttgccactaccatgcgatagagaatgaacaactaatcatgggacatgaagtaactaaggcagatctgagtaatttgagactttctggtccccaaagcacgaagtacatactgtcagcccttatcaaacaaaggttgtcagcttctcctttaggccaaaaaccccgagtttgtaggaaatcgcatgaaataaaggaatatttacacacaccatgagaatccaatcagaaatatctgattgtatgactttctaagagaatgagtgttaggaataacgctcaaaatcctaaggaaattgaacactcgaacaaaggattcttagcaaagcaattttacttctgtgcagaggggtgcctccttgaccagttgccatgagagcacacctgaacaaaggggcatgagagcctttactcctgatgcaagtcctgcccctgtaccctttccctattggccggggtcaggtcgtacaatctaaactaatcccggttggtgaaacacctgattttttttagatagggtgggcacgtagaagaaaagtggagaggaaggggaagggatgtctgtagtgagctagaaagtcctctttctaagtaaggaaaggtatgtgagctggtactgataacgctttgtactgtggcatgcctgggcatctaacaaaggcaaaaaggagaaaaaaggagaaaaagggggggtactatgaattagagaataaaagattgatgagattatttgaagagaaacctcatcatatcctcatatcccacagtgtgactctccaaaagtcaatataatatacaataataactgttctaggtaaaaagacactgaaaacattaacaattgcaatgtaaaaatcttgaatggatcttaaacccaaaaacatccaagagcatacgttgaatcaatgcggagaattttagttattataaaaagcagacattagatgacattattattttttatttaagtgaaatactagtattgtggtttcagaatgacagtgctatttttttaggcgatgcattaccaagtatttaaaggtcaagtatcacgtgtgcaattatgctcaatttacactcaaattgttcaccataaaatgtatttacctgaggtgaaagaaaacaagcacaatgctcaaaaagtaagtgttcaggcacagtggctcacacctgtaatcccagcattttgggaggccgaagcaggtgaactgcctgagctcaggatttcgagaccagcctggccaacatggtgaaaccttgtctctactaaaatacaaaaaaaaattagctgggcatggcggcatgtgcctgtgtcccagctactaggtgtcaggcctctgagccgaagccaagccatcagactccctgtgacctgcacgtatacatccagatggcctgaagcaactgaagaacaacaagaagaagcgaaaatagctagttcctgccttaactgatgacattccaccattgtgatttgttcctgccccaacctaactgatcaattgaccttgtgacattccttctcctggacaatgaatctcaggagctccccactgagcaccttgtgatccccgcccctgcccgcaagagaacaacctcctttaactgtaattttccactatctacccaaatcctataaaactgcccgacccctatctccctttgctgactccttttctgaactcagtctgcctgcacccaggtgattaaaagctttattgctcatacaaagcctgtttggtggtctcttcacatggacgcacctaatgctagggaggcaggagaattacttgaacctgggaggcagaggttgcagtgagccgagatcgcacctctgcaccccgacccgggtagcagagcgagactctgtctcaaaaaaaaaaaaaaaaaaactactagactgggtgtgttagatgttcaagttttccctaggatcaaatttttcagaaaaaaatgtcaaaactacacttagtctaaacatgctgttaataaattcaatagatactactttattacactaatactagaataatattctgattataaagcctccatcctggccaggagcggaggctcacgcctgtaatcccagctctttgggaggccgtcaggcggattacaaggtcaggagttcgagaccagcctggcgagcatggtgaaaccctgtctccactaaaaatacaaaaaaaaaaaattagctgggcatggtccccatgcctgttgtccctgctactcggaggctgaggcaggagaatcacttgaacccaggaggtggaggttgcagtgagctgagatcgcgccactgcactccagcctgggcgacagagcaagactccgtctgaaaaaaacaaacaaaagcctccatcctttcttcctgtgggcccgttttgaagctctgtgggggggtacagacctaggaacttcagataaagacaacagctgtgtattattgcctttctttcttttttgagacggagtttcgctctcatcgcccaggctggagtgcagtggcagatctcggctcactgcaacctcggcctctcaggttcaagcaatcctcctgcctcagcctcccaagtagctaggattacaggggactgccaccaagcctggcttttttttttttttttttttttttgtgtgtgtgagacggagtctccctcttttgcccaggctggagtgcagtggcgcgatctcggctcactgcaagctccgcctcccgggttcacgccattctcctgcctcagcctcccgagtagctgggactacaggcgcccgccatcgcgcctggctaattttttgtatttttagtagagacagggtttcaccatgttggccaggctggtctcgaactcctgacctcaggtgatctgcccgcctcgacctcccaaatggctgggactacaggcgtgagccagcgcgcccagcctgcctttcttttgtagaaaggcttgtagctggtaacaacaaaaaacattaagtccaagaaaataaaataagaaactaaaggctcacagtctacacgtgttcatatttacatgcagatataggcacaccctaaacgactattttttttccatcagaaagtaatgtgtcaaaaataagaataggacatcaatgccagattctcagacgagacatttttaagcaaagaaatggaagtcagagccctcttgaaaccaattttctgcaggtgttcaccaggaacatgccggaaacgccaggttcctgaggcgcggaaatgcggggccggagccaacctgactggaacggcagaaatccttttactttcagaaagaaagaaactcacaaaggttgctttccaagcttttgaagaagggagcacagcggatgaaaccactccagaaaacgcgcggagtcgggacaaacacacttcccgacctggctcctgactgggacccactgagcctgcggcctctagccactggccgcgcaaggaggaccgacagcccctggagaagagagtgaaacgaggcggatcggagaggctcctgggcgacagcacccaatcgttcctttgccgccccccgctatctccgggatccccaagcaggcggaactcaccacagccagggtggactccaccacgataaaggcgaaatggcactgaccatgcggagccagcgccggaaaagatggcgattgtgcgctgacgtcacttccgctccgagcctcgggccgggcggggctcctgggttcgagtttcagccacataggacccagtcaaacacagaaattgtagtttcttcccgggtgggcgcggacaggcccttacttgggggcggtttagaggtgggacccggctagccggcggttcaggtggccggacctgctggaagggcgggcgtgggggatgggacgcaccccaggggatgctcctgcagagcttttcccaggtgggcacagtggctaaggcctgtaagtccaacactttgggaggctaaggcaggtggatagcttgagtccaagagttcaagaccagcgtgggcaaaatagcaacatcctttattaaaatatatatgtgtgtatacatatatataaagcttgtttgtatacatctcatgttcctagagcctttccatgattcttccatatggataaagctgccagtgaatggcatggtctatctcttctattcagtcaggctttctgtaggcctttatttcttcattctttattttttagaacctgctggttccattgcgttttcttttttcgtttttctttttcattttttatttttttttgagacagatctcactctgttgcccaggctggagtgcagtggcatgacctcggctcactgtaacctctgccccccgggttcaagtgattctcctgcctcaacctcccgagtagctgggattacagatgtctgcctccacgcccagctaatttttgtacttttagtagagaagagtttcaccatgatggccagactgatctcgaactcctgacctccaatgatctgtctccctcagcttcccaaagtgctggaattatagacatgagccaccgcacccggccacgttttcaatataataatattttctgtaaatcttgatttttttttgtcttcatcaagtatgtatttctggctgggtatggtggcttatgcctataatcccagcaatttgggaggccaagggatcgtttgaggccaggagtttgagaccagcctgggcaatacagcaagaccccgtctctgtttaaaaaaaattttaaatatgtttttgtttttgttttgagatggagtctagctctgttgcccaggctggagtgcagtggcacgatcttgctcactgcaacctctgcctcccgggttcaagcgattcttctctctcagcctcctgagtagcagagattacaggcaggcgccgccatgcccggctaatttttgtatttttagtaaagacagggtttcaccatattggcccagttggtctcgaactcctgacctcatgatccgcctgcctcacctttccaaagtgctgggattacagatgtgagccaccacgcctggccaaaaacatgtatttctattgttatttttctgatcttcccacatgggccaggaccacatttcctacattgtaaaatagcactgacaccagacattctccccaggtttattcagaaatgtaacataatcccagtaaaaatattaaaagttttttctggagttaggtacgttgatactaaagtttatgtggaagaataaatatctgataataaccaagaaaacaaaaacaaaagcaatgatgagcagcagatgttaaaacatactattaacagttttcacacaaggcaaataattaaattatattaaaataaaaataaataagacatactataaagcctctataattaaaactatgtggtactagcacatgaagcagaaacagactaataaaatatctaaaaacagacccaagaacatgtaggaatttggttcataaatgtggtattttgccaggcgcggtggctcatacctgtaatcctagcaatttgggaggctgaggcgggaggatcacctgaagtcaggagttcgaaaccagcctgtccaacatggtgaaaccctgtctctaataaaaatacaaaaataaaattagccaagcatggtggtgggctttctgtaatcccagctattcgggaggctgaggcaggagaatcgctgaaacccagaaggcagaggttgcagtgagccgagatcgcgccactggactccagcctgggcaacaagagtgaaaatccatctcaaaaaaaaaaaaaaaaggtatttcagatcaatgaggcaaaaaaagccatttgtaatggaaagtctaagacagctgggtagccatcagagaaaagatgaaattaaatccatacttcacagcatatacaagaataaactctaaatggactagggatctaaatgtgaaaaataaaaccatatacgcattcagggtgtaagtgatttcttggctgagtaaggaaaaagacgtgaccacaaggcggcagtagcacacaagcttcatttgggatgtgctttgacaggtaaggagtggcgggaggtagcaaacagcaagagaatatccacaggcttctacctgtgggtcgctgctcagaaagggtggaaaggaagaaagactcccagaggagaaggggaatcaaagagggggcttatatgactaagtgacgatgctcagcagcctggcagcatatcttccagttaaaaagttctgaaggacaagtctggccaacatggtgaaactccgcctctactaaaaatacaaaaattagccgggcatggtggcgggcgcctgtaatcccagctactcgggaggatgaggcaggagaattgcttatacccgggaagcggcggttgtattgagccaagatcgcgccattgcactccagcctgggcgatagagtgagactcagtctcaaaaaaataaaaataaaatatgtaattatctgttcattctgagtacagggaaacactgataggactatcctgaaaataataagattcagaatctatcggggatagatgggaagggcttgaacagaatggtgggataagaacaaaatggagaggatagggatagggaaacctctctgagcatatcattctgtttagttctgatgtttaaaatcacattctactttttttttttctttttgacagggtttcactctgtcacacaggctggagtgtagtagcgttatcattgctcagtgcagcctttactttgtgagctcaagtaatcctcctgcccaagtaccagggaatacatatgtacaccaccacatccagctaatttttaaaaatattttgggtagagaagagatctctctatgttgcccaggctgctcttgaacttccagtctgtcacatataaagttttggtgccacaaaagaaataacacttgaatataaaattttctttttaattctcagcaaggcaagatacttctatagaagggtgcactctcacagatggagcaatggtgggcacacacctggacaagggagggaaaggggttcttattcctgacacacgtggtccctactgctctgtcgttcccctactggctagggttggacctcacaggctaaactaattccgattgactaatttaaagagagtgatggagtgagcggtttgggaaaagggtgctttatgaggaagttaagtttaaaagtagaaggcaaagaattgagcatactgacatattaattctttgaagagaaatttataattcattttcaacaacttcctcctcttgcattttttttatggctttctcttcaaacttatttaacatgtcttgacttagttgttctgcttgattttccaaaagaaggagcttctctggataaggtggaggatagttaaaggaggttttagtaagtgccatttctatgagcctctgcaccaacctacagatgcatggtatgacacggcacctgacaaggataagtacacccattacggctacaagggaggtgagaattgaggctattattcctttccatttaccgaaccacttttctagccattctgtaaatgggtaatttacccctgaattgctggccaactcattggatagaggagtcaggccttgcaatgcctttcttatacttccattaggggccgtgttgtttgggatgaagttgcaacaatgagttttaataatgatgcaaactcctcctctttctgctaataccatgtctaaagctatcctattttcccaagccatcaggttagtagcccccaattgctcagctattcctttaacagcatctctagtgtagttaataaatcgctgttggttgtaatagatgtagtttacccaatctacatttttttttttttgagatggagtctcactctgtcacccaggctggaatgcagtggtgcgatcttggctcactgcaagctccgcctcctgggttcatgccattctcctacctcagcctcctgagtagttgggactacaggcacctgccaccatgcccggtgaattttttgtatttttagtagagacagggtttcaccgcgttacccaggatggtctcaatctcctgaccttgtgatccgcccgcctcggcctcccaaagtgctgggattacaggcatgagccatcgcgcccggcccacccaatctacatttttattaactgtcgcctaccaaaatattgacttaaatcctgcagctattggattttgggctttaaattgatctggtattccccgtgggactccaattgcatctaaatagccgtgagagttgaaagacctataacgggcttgtcttgctttacgaagtcttatctttcctccctctggttgctgaaatgccagggtgaaagggatagccaattggactaaagcacaagtgccactccagttattcagcagagtgtccagtaaaggtccaccacaataccaccacacatccgctcagggatgagcaagggctgactgattggtaagctcttgaaagttcttaagctcactgcatcccttcaggtctccaaggaacactaagtttcctctctgttgtgagagacacgaagtgaacttaatgttgggagatggaagctggatggccctcgggggctgaccagcatgttgttgaacttcaggatatagcagagacagagagtcggcatgactctttaccctaggctgtagaatcctggaaaagagttaccatgcagcccatgcccggtctattggagaaccaccctagtggaaaggggacaatctgggcctctggcctgctgtgcgcactagcataacaattgcttttgtttaacatgcggatggaatatttgatccattccaaccaggtatttacatcttggtatcctgtctcaattgccaaagtttaagtctttaacttctaccatcgctatcatggccttgtccttagatggaggaggaacaatggttccgttgtgagaggttttggaaaaaggctaagaggcaggtgcaggcagcgggagatcaaagaaacgcatttcaaagaatccagtagggtctgtccttgaaacctcagcccctataccataaaaccggcttaaagaaaggaactggcttagaaaaggagaactttggggctcaaaatactaacctgtatagggttgcactggtttggctgacagttggggggggctgtccctttagtaaatgaatgtatggttttaggaaattccaaaaactggttagggcagtccatccttgctctttggtggtccacagaacgttggaccaactacggcataaaagctctacatcgggggttggggtcaagactcctggtttccactgggatctttatggaaatctcccagattaaatggtcctaattcactaatgcccagtctgaggagagccaggagggacagaggtgcttttctgaagtagtgagctgcctttgacttgacaaatccccacagggtataacaaggcaagcattaaatgcaacagtttgaggcaaaattgacttggttatgttaataactagatggtcagcaacagagcgaggaaagaagaaagagtaatagaatagatgaaagacagttaaattcttcttagctttagtttggtagggttttcccctgggactatggcccaccactctggaggtggtggcgcgttcttgactctggtgtgatgagtccatcctctctctgccgtgcggactgcggtttcagtagtgaggagcagtaagtaatgagattcccaggctggctcaggcttctcctctttccagctcttgatgaggacatgatccccaggctgatgatgcactgggaactctaagggtggcacctgtgctaatagacctttagttttaagagaagagagaatagaagatagacaaagtatataatttttaaggattgatcttttgtttcaaaggtaggaatatcagcagtggagtgcaaataaggtaatccatagagcatctcataaggagaaagaccaacgtctttccgtggtgcagtttgaattctcagcagggcgataggaagacacttggtccatggcaatcgagtctctaagactaatttggttaagtggttctttagagtctgattcattctttctactctccctgatgagggtgggtgccagggagtatggtgttcctatttaatgtctaatgtttgggatagctttttaataatgtgtgtggtgaaatgagttccattgtctgagtcaatattttctattagtccaaacctgggtactatattttcaattaaggccttaactacattattggctgttgcatttgaaaaggggacagcttcaaccaagtgagtgaggtagtctactatcactagtaaatattttagacgacctattggaggcatttctgtgtaatcaacttggatactttggaatggccttaagcccagattccttcccccgagaggtaatctttttatagtatgtctattagttttcttacatactaagcaactatctgtaacctgtttggccagagtataaattcctatataactataaactctgagaactgcatcacacatggcctggggcccccagtgggtctcatgatgtagttaggataagacttccctcataaggggtttggacaacatttctctctggtctgacagcatccactttccttctgaattctctttagcgtctatgtttattagtttctcttttttggtggaagagaaaatggggattatggtaggaggagggaggtagggagttaagtgaaaaatatgcatttcagaagacacagcagcctgcttggctacctgatctgctaggttatttcctcgactttcaaaagaggtttttctgttgtccgggaacatggacaatagttattttttccggcaactgaagattattcaatacttgggtgatcagctccttgtgaacaaggtcttgacctttactattaatgagaactcgttcagtccaaatttttccaaatgtatgagccacttcaaaggtgtacttagaatcggtatagatagttccctcctggtcctgtaagtactttaaggcttggctgagtgcaaacagctcacacatttgagcagaccaactgttgggcaatttttctgactctatttctatgagagtttctccatcaatcactgaatacccattgtgtctttttccctcaatcacccaggaggaaccatctatgaataagtgccctccagtccagaagggggtttctcctaggtctggtcgaacctttctatggtaatcaattaaatctaaacatgtgtgttctctccttagatttggattccctgtaggaaacctgctgggttgagtgaattatcagtggtcagtgttaaaccatccttttttttttttctttttttgagacggagtctcactctgtcaccaggctggagtgcagtggtgccatctcaactcactgcaacatccaactcccaggttcaagcgatcctcctgcttcagcctgccaagtagctgggactacaggcgtgtgccaccacgcccagctaatttttgtatttttagtagagatggggtttcaccatgttggccaggatggtcttgatctattgaccttgtgatccaccagcctcggcctcccaaagtgctgggattacaggcataagccaccatacccggccataaatcatctttttctaacagaatggcctcatactttaagattcttgagtcagtaagccatctccctgctctatggtttaagatagttctaacttggtgaggcgtgcttactgtcaattttcctccaaaggttaactttctgctttccttgactactattgctgtagctgcgatggactggatgcattgaggccatccacaagtgactgggtctgaggcttttggtaggaaggctacaggctgtcggcagcctccatgctcttgagtcagcactcctaaagttatcccactgtccacattaacaaaaaggtggaatggcttttccagggagggttaggctaaaacaggggcagttatgagcctttccttcagcttctcaacttgatcaacttcctcagaagtccacaggagacagttaggtttctcctgagcaagtttttgatataacagtttactgtgcagtgcatatgagtcaatccaaaagcggcagtatctaactaatcctaaacatttcctgagttcttgtttagtttgaggcaagggtagggacacaattccctcaattcgttcaggccctattcttcacttgtctgcacttattaagtggcctaaatacttaacttcgggatctacatactgaagctttcttgttgagactcgtagcccctcaaactacaggtgattaagaatatgtgtagagaagtcagttaccttctctatatcttcaccagatataagaatgttgtccacgtactgaagaaggtatatttgttctgggatgacaactttttctagtacttgttctaaactttggccaaaaagattaggggagtctgtgaacccttggggcaagactgtccatcgatattgttgtttccaccctgattggggatctcagctatcttcagccaggggacatgcccaaaaagcattcttcaaatctattacagtaaaccattgatgattacatgaaatcttgttaagaatagtgtaaggattggggacaacggggtgggtagtctggactatttggttgatagctctacagtcctgtactagccgatatgacccatctgatttcttgactggcagtattggggtgttttaaggagacatacagggctggagaagcccgtccttaataaggcctttgattataggtttcaaccttatcctgccttctaggggaatagggtattgtttccttcttactacttctcctggggtttttagctgatgtggattggagggacttggagtttcccttagtctccttctttggaccagacattaggattaatatatttttcatccgcagtggtgagtaggtttaatggggtgaagaattctcttgggctgacttgtagacctatgcccaactttaacattaaatccctccccaggaaattagttcctgcttcagggattaacaagaactgaatataagctgagcgatcctggtgtctaacttctgtgctttgtaaaatttttgctctaaatccttccccttttaccctggaaactaaaagttcctctgaggaggagccaacattagatggggggaaacaaacaggagcgagcagcccctgaatcgactaaaaaggcgataagctcatgtttaggtcccacatccaaattgatcaagggctcctggtgggactcaagataaaagagacagggcccctgacccccctattccttgaaagtcatgagtggaagggcttctttctccttagttcaggacattctctcttgaagtggcctgttcttccacatctatagcacatatcttgtccttcctccctcttagttctgggattctttaaccctgtccccccatactctttagggggcctggtagatgaggacctttgtcctccagatggaggctgggggcctttaaaacagggttcagaccctttatactttctaggtccctggaagctctgtctagaagtacctgggtttggagccatctgttggaaggtggaaaacataagttttgttttttgtttctgtttttcttcatcccgtttcacatgtactttctaagcttccctgagaagctcacttagaggacggtcttcccaattgtctattttttataacttttttgaaatgtctaggcaacttttactgacaaattggagtttcaacattccttgcccaaggagatcatccaaagtaaggcctgcatattgcctcatttgctccctcagtctgtctaggaatctcacagtcccttcatccttttcctgttgtatatcaagcgctttagaaagattgcgggttcagggtactgattcctgatttccttttattatcatctcccttaggtcctgcatattttcccggtgatctgcgttgttattgtcccaccgggggtcttgggtggggaatttctgttccgcggtaggaacgtttttaccgggagggtgctcacgttccctaagtaccatagcagccctaggaatcatactccttttttcccctgaaaagaggacggccaagatggacattaactcgacccaagtgtaactgaggtcctaagaattggtcaatttggtctgccactctgtaaaggtcatctagtagtggtttaagctcctttttaaaattccggacttctgaactggttaagggagcatttacaaagccaattacaaagccattggcccccactccttgtggtacctctttcaaagggaataaggtcagggctgacctcttaggtatggagggaagcggaaaattctgagtatcttttttacattgttctacctcacgctggagtccttttagagaggggtatttaggttggggggaggacaggctggtgggatggtaattcccaagagtcagggttataaggaggagggataacacgagtagagggggagtttagaatgggatctgaggtggaagtggctgtctgaggggaaagattggggatactgaatggaggaagatagtttaggggatcccatgcactggagtctttaggcatgagatctggctcctctgacttttcattttgaggtgccagattgggttcttccctatttgtttttaagggaaaaaggagggctggtccttgcctccaacaaagggcatagcgtagttcttcttgagacactggacttttattattaacatatcagattggaagctgacacattacatcctcagttgattcaaactttggccagaagattgaggaattaaggatgggtccctgagtccaaataaaacagcaatattttattatttgttgctttttcctatgtttagtcctttcattatccttccagtgtttcagcatgagacctagggggctatctgggggaatatctttgttaccatctttatcccccttgctccctgtcttgcttggggtatttcccatcttgatggttttggggtaaggttcaaggttcagtttcccttactggaaatttctcacctttcagggtgaggcttaattttcactggaaactttttgccttttggggtaaggctcaatttcccctctggaaatttcttgccttttctactattggaggtttgtgtgaggttcaatcccccccaacaatggggatgtctcacctctttttaaccacttagccaccctgaccaaggagtacttcactgcacccacccccaacccccgtggctttcttaccttgttcctgaccaccaaggaaatactttactggctcctgtggcatctccttccttggtaggtgcacagagtcatcactgcagtatgtgaggatcctttaagctaggttgctggccagttgtttttttcctgcattgcttagagctagggttattcctcacaatgggtgggttctgatttctcccctatgaggccaccacaaagggtggggtgcatgcctcctcaagagagagaaccagagaccacccccagaggggaatgtaatcctggatgagcccccaaattgttatataataagtttcagtgctgcaaaagaaatagcactcgaggccagatgcagtggctcatgtctgtaattccagcactttgggaggcctaggtgggtggatcacaagggcaggagatcgagaccatcctggctaacacagtgaaaccccatctctactaaaaaatacaaaaaatgagccgggcgtggtggcgggcacctgtagtctcagctactcaggaggctgaggcaggagaatggtgtgaacctgggaggtggagcttgcagtgagcagagatcacaccactgaaccccagcctggacaacagagtgagactccatctcaaaaaaaaaaaaaaaaagaaaaagaaatcgcattcaaatataaaattttatttttaattctcagcaaggcaaggtacttctatagaagggtgtgctctcacagatggagcaatggtgggcacacaccttcacaaaggagggaaaggcgttcttattactgatgcacctggtccctactgctgtgtcattcccctattgggtagagttagaccacacaggctaaactaattccaactgattaatttaaagagatggacggggtgagtggtttggcaggaaaaatggttatgaaatgaattggaatgaatgagtcagggtggagaaggtaatctgaatgagcagaatgagtcagggtggagtaggtaatgagtcaaggagtagaatgtgtcagggtggaaaaggttgctttacgaggaagtttaaaagtagaaggcaaagaattgagcatactgacatattaattctttgaagggaaacttcgaattcacactcaacaactctaaagtgattctctatccttggcctcccacatttcttttttttttttttgagacagactctcactctgttgccaggctggagtgcagtggactgatctcagctcactgcaacctctgcctcctgggttcaagtgattctcatgcctcagccccccaagtagctgggactacaggtgccagccaccacgcccagtgaattttcgtatttttagtagagacggggtttcaccatgttggccaggatgctcttgatctcctgaccttgtgatccacctgccaaggccacccaaagtgctcagattacaggcatgagccaccatgctcagccttggcctcctacattgttgggattacagacatgagccactgtgcttggccctttattcctttacatatttaatattttaaaaaattaacaaagaggccaggcacagtggctcaggcctttaatcccagcactttgggaggctgaggtgggtggattacgaggtcaggagttcgacaccagcctggccaatatggtgaaaccccatctctactaaaaaatacaaaaattagctgggcatgctggtgcgtgcctgtagtcccagatactcaggaggctgagacaggagaattgcttgaacccaagaggcagaggttgcagtgagccaagatcgctacactgcactccagcctgggtgcagagactccatctcaaaaaaataagtaaataaataaacaccacacccaatcagctcaagcctgtggctagagataagaatgcagaaagaattggccaggcgcggtggctcacgcctgtaatcccagcactttgggaggccgaggcgggtggatcacgaggtcaggagattgagaccatcctggctaacacagtgaatcgccgtctctactaaaaacacacacaaaaaaattagccgggcgtggttgtgggcacctgtactcccagctacccaggaggccaaggcagaatggagtgaacccgggaggcagagctcgcagtgagccgagatcacaccactgcactctagcctgggtgacagagcaaaactgtgtctcaaaaaaaaaaaaatctagaaagaatctagagacatctttcctgcccaagatagtgttttcctcctacttcctttaaactgactatccatgtatttgctcctaaatttaaagtgactcacaccctattcccttatgtatacagctagctgccacaacctccctccttctctgcctctcatccctgccttgcgtgacccatggatggaagactgtcctcaaaactcattttgccctcccttcccaggacgtgtaagcaataaatctttgaaattatgtcctattggggtggtgttttgaatttgcacataccatctgaagaaccaggggccgcccctggttgagatttccccagggagctggtggggacacaaggtcaggtttccagtgtcagagtgatgatcaggcaggcataaactgaacacaggtcagacaagagcagctatgtcgctgggcacggtgactcacgcctgtaatcccagcactttgggaggccaaggtgagcggatcacctgaggtcaagagtttgagaccagcctggccaacatggtgaaacctcgtctctactaaaaataccaaaaatattagctgggtgtggtggcatatgcctgtagtcccagctactcggggaggctgaggcaggagaactgcttgaacccaggaggcggaggttgaagtaagccaagatcgggccactgcgctccagcttgggagacacagggagactccatcttaaaaaaaaaaaaaaaaaaaaaaaaaagagcggcctaggtcatctatcagtataaacaagtttcccaggtgagggaccccctgtcaaccaggttttgcgtgacaactcacactgtaatcccagcactttgggaggctgaagcaggcagatcacttagctaaggagttccagaccagcatagccaacatggcgacaccccgtctctactaaaaatacaaaaattagcccagcatggtagtggaggcatgtaatccaagctacttgggaggctgaagcaggagaatcgcttgagctctggagtggcaggttgcagtgagctgagatcacgctactgcactccatccagcctggatgacaaaggcagactctgtcattcatcaatcaataaataattaattaactttaaaaaatgtatcccttaggccagtcgtggtggctcactcctgaaatcccagcactttgggaggctgaggcgggcagatcgcctgaggtcaggagtttgagaccagcctgaccaacatgatgaaaccccatctctaataaaaatacaatattagccgggtgtcgtggttcatgcctgtagtcccagctactcaggaggctgaggcaggagaatcgcttgaatccaggaggcagaggttgcagtcagccaagatcaagtcattgcactccagcctgggcaacacagcaagactccatctcaagaatgcaatggaatggaatggaatgaatggaatggaatggaatggaatggaatggaatggaatgggccgggcatggtggctcacgcctgtagtcccagcactttggaaggccaaagcgggtggatcacctgaggtcaggagttcgagaccagcctgaccagtatggtgaaaccccatctctactaaaaatacaaaaataaccccagctacttgggaggctgaggctggagaattgcttgaacctgggagacagaggttgcagtgagccgaaattgcgccactgcactccagcctgggcgatagagggagactccatctcaaaaaaaaaaaaaaaaaaaaaaaagaatagaatagaatagaacagaatagaatagaatagaatggaaataatgctgagtgcagtggctcacgcctgtaatcctagcactttgggaggctgaggcaggcggattgcctgaactcaggagttcaagaccagcctcagcaacatggtgaaaccccgtctctactaaaatacaaaaaaaaaaaaaattagccaggcgtggcggatgtgcctatagtcccacctacttgggaggctgaggcagaattgcttaaaccggagaggcggaggttgcagtaagctgatattgcgccactgcactccagcctgggcaacagagcgacactctgtctcaaaaaaaaaaaaaaaaattaaattaaattaaaaaaaaaataggctgctgggcgcggtggctcacgcctgtaatcccagcactttgggaggctaaggcgggtggatcaacaaggtcaggagatcgagacaagcctgaccaacatggtgaaatctcatctgtactaaatatacaaaaattagccggacgttgtggcatgtgcttgtaatcccagctactcagaaggccgaggcaggagaatcgcttgaaccccggagaaggaggttgcagtgagccgagatcgtgccactgcactccaacatgggagacagaacaagactccaactcaaaaaaataaataaaataaaaataaacaaataaataaataaaataaaatgtatcacttgaaagaaaggctccctgtaaacacccacatctggctccccttcatttcttgttagggcagcattgctagtcactctgctattggatccttaatataggtaggggctcaagacagaccaaaacggaaagaaaaaaataaacaagaactgacccaagtaacttctggggttttttaaaatttttttattttttattttattttatttttttgagacagagtcttgctctattggccaggctggagtgcagtggcacaatctcagatcactgcagcctccacctcccaggttcaagtaattcttatgcctcagtcggccgagtagctgggattataggcacatgccaccacacccagctaacttttgtacttttactagtgacagggtttttgccatattggccaggctggtctcgaattcctggccccaagtgatccacccaccttggactcccaaagtgctgggattacaggcatgagccactgtgcccgggcagtaacttctgttttattgtatttctttttactgtgataaaaagcacataaaattgacaagtaacacattttttttttttttttttgatgcagggtcttgctctgttgcccagcctggagtcagtaattcaatcatagctcattatagccttgaactcctgggctcaagcaatccttctgcctcagcatctcaagtagctgggactacaggtgtgcaccaacatgcctggccaggttttaaaaaatttttgtggagacagggtcttgctatgttgcttaggcaacaggctgaaactctgtctctacaaaaagtaccaaaaattacccaggtgtggtcgtgcatgcctgcagtcccaactactggggagtctgaggtgggagtatcacccgagctcacgaggtcaaggttgtagtgagccacaattgtgtcacggcactccagcctgggtgacagggtgagaccctgtcccccagaaaaaaggaagaaaaaaaaaaaccaaagtcttagaagtataactctttttagaattgatatgtaaagctgggctcagtagctcatgcctgtaatcctagcattttgggaggccaaggcaggcagatcacctgaagtaaggagtttgagaccagcctagtcaacatggcaacaccccaactcaactaaaaatacaaaaattagctgggcaaaggccaggtgcagtggttcacacctgtaatactcccagcagtttgggaggccgaggtggggggatcacaaggtcaggagttcaagaccagcctgaccaacatggtgaaaccctgtgtcaactaaaaatacaaatattagctggacttggtggtgcacacctgtaatctgagctactcaggaggctgaggcaggagaatcacttgaatccaggagaaggaggttgcagtgagcccagatcgcatgattgcactccagcatgggcgatagagtgagattctgcctcaaaaaaaaaaaaaagttaaataaataaatacaataaaataaaataaattagctgggcgaggtggcacatgcctgtaatcccagctactcaggaggctgaggcaggagaatcatttgaactggggaggtgaagggtccagtgagccaagatcatgccactgcactccagcctggatgacagagtgagatcaactaaaaaaaaattgatatgtaatagttgtacactattgccttgaatgcctggcctcaagtaatacccctggctcagtgtacttagtagttgcaatggaaggaatacagcacctaaactcaagagtttttttgttttttttttttggtagagatggtatctcactccattgcccaggctattctcaaactcttgagctagaatgatcctctcttctcagcctcccaaagtgctcagattacaagcatgagccaccattcccagcccagacatttttacattacatgaaattttcaaggtccagttggtcctaattctccataaatcctttcagagtattaaaaatgaagcaaattttgctaaagctttttatgatgccagtacaagatatatgtatatcttgtttctatcactgataaaaatagtacaatcattaaaaactgcagaatcatatcagtaatgaatattgctacaaatgtactaagtaggccgggcacagtggctcacgcctgtaatcccagcactttgggaggccaaggcgggctgatcatgaggtcaagagattgagactatcctggccaacgtggtgaaaccccatctctactaaaaatacaaaaattagctgggtgtagtgtcgcgtgactgtagtcccagctactcgggaggctgaggcaggagaattgtttgaacccaggatgcagaagttgcagtgagccgagatcgcgccactgtactccagcctggcgacagagcaagactccatctaaaaacaaacaaacaaacaaaacaaacaagcaaaaaaacaccaaaaaacaaacaaaaaaaatgcactaagtataatagaggcaggattgcttgagcccaggagtttgagagcagcctgggcaacatagcaagcgactatctctacaaaaaatttaaaaattagctgggtgtggtagagcacccctgtactcccagctacttgggaggctgaggtgggaagattgcttgagcccaggaggtcagggctacagtgagctgtgtctgcaacactgcacctagcctaggtgataaagcaagatgagaggggaagggaggggggggaggggaggggggaagaaaagaaaggaaggaacgaagggagggagggagggagggagggagagagggggagagagagagagaaagaaagaaagaaagagagagagagagaaagaaagaaagaaagaaagaaagaaagaaagaaagaaagaaagaaagagaaggaagaaaggaaggggaaagaaagaaggaaagaaagaaaagaaaagaaagcaagaaagaaagaaaaggagagggagggagggaaggaagggtgaaaaagaaagaaagaaggaaggaaggaaggagaaagaaaggaaaggaagaaagaaagaaagaaaggaaggaaggaaggggaagggaagggaaaggaaaggaaagaaggaaaggaaggaaaggaggaaagaaagaaggaaggaaggaaggaaagaaagaaaaagaaagaaagaaagaaagaaagaaagaaagaaagaaagaaagaaaggaaggaaggaaggaaggaagaaaaagaaagaaagaaagagccgggtgcggtggctcacgcctgtaatcccagcacttcagaggccgaggtgggcagatcacctgaggtcggaagttcgagaccaggctgaccaacatggagaaaccccgtctctactaaaaatacaaaattagctgggcgtagtgacacatgcctgtaatcccagctactaaggaggctgaagcaggagaatcgcttgaacctgggaggccgaggttgtggtgagccgagatcacgccattgcactgcagcctgggcaacaagagtgaaactccgtctcaaaaaaacaaaaaaacaaaaaacaaaaaacaaaaaaagatgaaagaaagagagagagagggagggaaagaaagaaattagcaaacaaattccaacgccatggtaagaaagtagtaaacccagtggcatttactccaggaatgtaaggttggttctggctgatttgtatctttgtattagtgcattcaccattatggatgatgtgtggagtttgcccacagcaatactcaagaccctttcagacacatcctcccccaaaggggaacattcacctgttctcaggggtaaaactgcagcctcagtggaggacagatgaaaccctctgctctgacggactagagaatgcagtgggggatagacggcagcctcgccagacagcagtcaattctctggccctctgcaactctggatagggctgagtccctactttcaggtggggagagtcactctgggggcttcaagaacactcttctgtcagtccatccaaccaggttcaggagccaatggaagaaatctgagaaaggaaggggttctgttgaagatggcttttgagaatcactgaaataaatgcctggtaggtcttgaaattctaacttctgacgtattagtccattttcatattgctatgaagaaataacagagactgggtactttttttttttttttttttttttgagatggagtctcgctctgtcacccaggctggagtgcagtggcacgatatcggctcactgcaacatccgccttccacgtttaagtgattctccagcctcagcctcctgagtagctgggattacaggtgcacgccaacaggcctagctaatttttgtattttttagtagagacagagtttcactatgttggccaggatggtctcaacctcttgacctcgtgatctgcccacctcggcctcccaaagtggaattacaggcatgagccactgtgccaggcctttgttttgttttgttttgttttgttttgttttgttttgtttgagatggagtattcctctgttgcccaggctgaagtgcaggggcacgaccttggcttactgcaacgtccacctcctgggttcaagtgattttcctgtctcagcctctggagtagctgggatcacaggcgccagctaccacgcccagctaattttttgtatttttagtagagatggagtttcaccatgttggccaggatggtctcaaactcctgacctcaggggatccacccgcctatcctccaaaagtgctgggattacaggcgtgagccaccacatccggcttgataactcttatttttttgtagagatggaatctcactatgttgcccaggctgatcttgaactcctggcctcaagcaatcctcctgacccagcctcccaaagtgctgggaatatgtgtgtgagccaccatgatcagccagaatagacaacttttattattttttaaaatattttgtactattttttttcgagatggaatcttgctctgtcacccagagctggagtgcaatggcacgatctcaactcactgcaacctccgcctcctgggttcaggcaattcttcctcctcagcctcccaagtagctgtattacaggcttgtgccaccatgcctcgctaatttttgtatttttagtagagatgcggtttcaccatattggccagcctggtctccaactcctcacctcttgatctgcccaccccaacctcccaaagtgctgggattacaggtgtgagccaccatgcccagcacgtagtatttttcagtagagatgtagtctcactatgatgtccaaggtggccttgaactcctgggctcaactgatctttttgcctaagccttccaaagtgctgggattacaggcctgagccactattcccagcctagattcttatagcatatagatggataaagaatttagaaaaagtaggaacattccccaatacagtatatgacagtcataatttacatgtaaatatcattcagggccgggtgcagtggcacacacctgtaatcccagcactttgggaggccaaggcagttggatcacgaggtcaagacatcaaaaccatcctggccaaaatggtgaaactccatctctactaaaaatacaaaaattagctgggcgtggtggtgcatgcctgtagtcccagctccttggaggctgaggcaggagaatcgcttgaaccggggaggtggaggttgcagtgagcctagatcgtgccactgcactccagcctggacacagagccagactctgtctcaaaaaaaaaaaaaaaatcattcagggacaagaagaaaaaaaaattgcagttattcaaacatagctccataacatattagtaaaggtaatcaaatagtcttttaaaatgatccattatgtctcagttgggcttatccaggaatgcaaggttgatgtaacactagaaatgtaataaatacaaaaacacatttattttattttatttctgatggagtctcactctgtcaccaaggctggagtgcagtggcacaatctacacttaatgcaacctccacctcccaggttcaagcgattctcctgcttcagcctcctgcgtagctggaattccaggtgcacacaaccacacccagctaatttctgtatttttagtagagatggggcttcaccatgttggccaggctggtctcgaactcctgacctcaagtgatctgcccatccctgcctcccaaagtgctggtattacaggcatgagccaccacacccaacctgaccacatttattttagagatgagtccttccatgcattcattcattcgttttgttttttgttttttgagatgtggtcttgctatgttgtctaagctggtctagaacccctgggttcaggccatcctcccaagtagctagaactatagacatgcatcaccacatcatttcattgaagtatttattacataccatcattggccaggaacagttctaggtacttgagttctagcagtaaataaacatgatcatcacagaggatgcacaggaagcatttaataaattcaagaggaattcagcctcatgaattatgaaatactgggaaatcattcatcatgtaaaaactggatataaaaagaaacctttcctgtaagagattagcctcttcaaaaaataaaataaaaacctacagccaagccaataaaatagagcacgtatctcagcagaactgcagacaattatgctggtattactgctattcattggtggtgtgctggaggttgaaattagtccagtaaagcaagaaaatatatatataggtataacctaacgactaaagtggaaaagtaagagtcattatttacagattatgtgattgtctatgtggaaacggaaaagaatcatattaagtactttggactgaatgataaccctgaaaattcatatgttgaagctccaaatcccaatgtgactgtatgtgaaaatagggttttttagttttgtttttgagacagagtctcgctctgttgtccaggctggaatgcagtggctgcgatctcggctcactgcaacctgtgcctcccaggttcatgccattctcctgcctcagcctcccgagtagctgggactgcaggtacccgccaccacgccaggctaattttttgtatttgtagtagagacagggtttcaccgtgttaactaggacagtctcgatctcctgacctcgtgatccgcccacctcggcctcccaaagtgctgggattacaggtgtgagccaccgcgcccggcctgaaaataggctctttagaagtatcgtgaaatgatgtcaagagatgggtagggggagggagggggagggaggggaaggagagagatggtggggagagagagagaaagaggagagaggagagaggagaaaggagagaggagagagagacctatttgttggtttccttcctgtgaagacatgaggaagtgggcatttacataccaggaagagagctctcgccagaagttgaccatgctggcactctgatctcagacttccagcctcgagaaatgtgagaatataaatttgtttttaacctcatttatttaaaattaacaaatttgtaagccatttggtctgtggtattttgtgatagtggcctgagctcattaaggcagattaaaaacaaacaaacaaaaaaactaaaaatgtgaagcagatttgaaactgacaaatgaggctggaaaaattctgatgtgcaagctggaagtaaggttggtaagggtgatcctggtgaggtgtcattggggaatgaggaacatgctattgggaaataaagaaaatacaacccttgatacgaagtagtgaagaacttggcagaactgtattctagcactttgcggaaggtagagcttgagagagataaaactggttatgtatcactaagatctgtacttaaagtgttaaaggacacaggaagcttcattcttcctgagtgcttacaggaaaatgtgctcagaacaggccccccaaatttggacataaacaggccatgagaaactgcccataaacaaaatctctgcggcactgtgacatgctcgtgatggctatgacacccatgctggaggttgctggtttacccgaatgagggcaaggaacacctggcccacccacggtggaaaactggaaaactgctcaggcattcctaaaccacaaacaataccatgagtgatttgtgccttaaggacatgttcctgttgcagataacaagccagagcctgtccctttctttcttgtaaggaatacttttagctaatctataatctatagaaataatgtttatcacaggcttactgtcaataaatatgtgggtcaaactctgttcaaggctctcagctctgaaggctgtgagccccgattcccactctgcactctatttctgtgtctttgtcttaattcctctagagctgctgggtcagggtctccatgacccagctggtctcagcaaaaatgcaaaaggagacctgaattgcagaaaaaattgttaaggaaaaaggaaccagaacttggagatttggaaaattctcagcctatccataatgcaaaaattagaaaacttgtactgaagagaatcctcaaagtgtggctgaacgatcatctgataaagagatcatgagtgggattcatggactatatcagccaccttgacagaagtgagaagagagactggattatactagaagagacattgccacttacattgtgccatctaaaatagacatacaaggcagaacaggcaaggctgtcacacttcttagattttacaaggggacacagaaataatcagctgtgaaagggcactggcagttatggatggtttcattcctgacacgctctgcaggatccgtgggatcagaagagacccttggaggagcatctcttaacaacccacctttggggtcctacatcatcttggcttctggtaaattttgacataaatgtgccacactggcagccactaaccaacaggggctggggtcaatctgcatgatttatctcatacacaacttgttaatgctatgatcttaggaatctaatcaccaaggtgaggcagcctgcagtactgacctcaccatccatgacccttcttcacagatgcccagactcaggcaaccatgatgttgtattcagaacctgtaggtttaatttcagaccctcaggatggtatctaaggccaatccatgagtcattacaacctccaaaaggcatttaggacaaatctgataatctttggtgtcattgccaataattaaagatggcaaccgatgggctaaatggtaacactcatatccttgcattcatagggtttctccccagtgtgaattctttcatgtctacttaggcgtgaggaaacagcaaatgctttcccacattctttacatacgaagggtttctctccggtatgagttcgcaggtgaacattaaggcgtgaggaatatagaaatgctttcccacatatcttgcatacaaagggcttttctccactatgagttttcaaatgtttactacgacgggaagaagtaatgaaggtcttcccacattcaacacattcataaggcttctctcctgtgtgaattcttgtatgctgaataagacttgtggatgtagtgaaggctttcccacattccttacactgatagggtttctttccactgtgacttcgtatgtgtatagaaaggcccgagtactgagcaaaggcttggccacattccttacattcatagggttttattccagtgtgagttcttacatgttcagtaagttgagttgatctagtgaaggctttcccacagtaagtacacttgtgtggttttattccagtgtgaatttgaatgtgatcattaaggcatgaggaatttctaaaggatcttccacattctttacattcaaaggacttctctcctttatgagttttcacaggtgcataaagttgagaaaaattagtgaaggatttcccacatttcttagtctttttggatttctttcctgtatgaactgctacacactgctttaggtgtgaagaagctgtgacagctctcccatattcctgaaattcacagagtttctcatcagtgtggattcccatatgattatcaaggcttgcaaaatacttaaagccttttccacattccttacatttgtagggttgtcttgcattgagaacttcaagatgtacagcaagacctggagttagagtaaagacttttccacatggattaaatttggaaagttcctgtccagtagaggcttccttgtgcacactgagggtgtcttttccataacaattaccctcagaagtattccctccattctgaactctcatgtgtgtcttaaggcaaaactgttccctgaagacctctccacaattcttacagtcacagagtttccatccactgtagcctcttgtctgttgatgacgagataaaggttttaaaacattttcagacatattaagagatttcacccatctgaacacagaagcattttgatgacaattatgattttactttttaatatttaatttttttttctttttgagagaaagtcttgttctatctccctgtctggagtgcatggcacactctcagctaacggcaacctccacctcccaggctcaactgattctcctgcctcagcctcccgagtagctaggaatacaggtgtgcaccactgcacctggctaatttttctgttttgtagaaacaaggttttgccaagttacccaggctggtctcaaactcctaagctcaggtgatctgcctgcctcggcctcccaaagtggtgatattacaggcatgacccaccacacccagtatgtttcacttttttcagagttggggttttgctccattgcctggactatagtgcactggtgtgatcatggctctctgtaacctcaaactcctggctgagttcaagtgatcatcctgccttagcttcctgtgtagctagaactatttgaatgcaccctcatgtctggccaatctttcagtttgtttgtttatttatttatttagagacagagtcttgctctgtagcccaggctggagtgcaatggcatgatttcggctcgttgcaaactctgcctcccaggttcaagtgattctcctgcctcagcctcctgagtagctgggattacaggcatgggtcaccatgcctggctaatttttgtagttttagtagagacagggtttcaccatgttggccaggctggttttgaacccctgacctcagatgatctgcctgccttggcctcccaaagtgctgagattacaggggtgagccaccatgccccacctcagtttatttatttttgagatgtagtctcactttggctggagtgcaagtggcgagatcttggctcactgcaacctccacctcctaggctcaagtgattctcatgcatcagcctcgcgaatagctgggattacaggcaggtgtagccacatccagctaattttgttattttttgtagagatggggtttccccatgttcgccaggctggtcttgaactgctgacctcatgatctgcctgcctcaacctcccaaattgctgggattacaggcgtgagccaccacacccagcctcaatttatttttatagagacaaagtcttactatgtagcctaggctgatctcaaactcttcacaaaaccccactgcctcagcctcccaaagtgctgggattacagccatgagctaccatgtcagcctactttgataattataatttttacaatttttcttccttgtttttattccctgacttcttgatttcttccagattgaatgatgggcccttttgccagaattctacgccactggctctaattgttcaaaaaaagaaaactgtagggtttttttattattatgcagggtggtttgagacaaggtctcactctgtcacccaggctgggtaccatggcataatcacagctcactgtggccttaatctcccaggctgaagccatcatcctgcctcagtcccccaaggagcttggattacaggtgcatgccaacacgccctgctaattttttattccttgtagagacagggtctctgttgaccaggctggtcttgaactcctaggctcaagtgattctcctgcctcagcttcccaaagtgctgggattacaggtgtcagccattgcacccagtcaaatagtgtagattttcatgaaactgtgtaaatcctcaatgtctagttacttatgtgggaatgtgtacttgtgggtattttgaggtgacaagttatacagatatggaatatcataaaattcatcacattcagactatctctccagagatcctgctccctcagtggtgcagaattcttctctaattctctcaagtatctctcatttgtgcagtttctttttcactgcaaactccacctcctgggtttaagcaattctgcctcagcctcccatgtatctgggattacaggtgcctgccaccacacctggctaactttgtatttttagtagagataagagtttcattacattggccaggctggtctcgaagtgctaatctcaagtgatccacgtgcctaggcctcccaaagggatgggattacagactcagtttcttttctttatttctgagacagagtctcactcggtcaaccaggctggaatgcagtggtgcaatctcagctcattgcaacctctgcctctgtgttcatgccattctcctgtctcagcctcccaagtaactggtatgacaggtgcccaccaccacactcggctaattttgtattcttagtagagatggagtttcaccatgtcggccagcctggtctcaaactcctgacctcaagtgatccacccatctcggcctcccaaaatgttgggattacaggtgtgagtcaccacattcaccttctttttaaaatcagagatgggatcttactatactgcctaggctggtcttgaactcttgggctcaaatgagacccccacttcagcctcccaaatagctgggattacagatgtaagccacacctctgactgagctgattttctagaatggaattctctatcttttctaagagaggaaattaagaaatatccctcatgaatcttaccatttgtatcccactgaatatttgattcttcaaaaaaccctgctgaagtgatgaccgtttggttctaggttgtatttcccattctaaagttaagcagaaaaagaaacgtaaggatttagagaagaaatattcatttaaaatgagtcatttttacttgttttcaaattaaacacagcaataaaataaaagccagagaaccttgaggattttggtacatcaaaaatttggctataatgatgtggggtttattacataactgatgtgtttagatagtttattacaaactacttctgtaaaaattaaaaatgccgggagtggtggctcacacctgtaatcccagcactttgggaggctgaggcgggtggatcacttgaggtcaggagttcgagaccagcctgaccaacatggagaaaccccatctctactaaaaatacaaaattagccaggcatggtggcgcatgcctataatcccagctacttgtgaggctgaggcagtattgcttgaacctgggaggcagaagttgcagtgagctgagatcatgccattgcactccagcctgggtgacagagcaagacttcagaaaagaaaagaaaattaaagctgatggaaaacagaaagagtagattttcgggaaaggaaagtaggaaagatctagataaacagcatgtatcagaatgataaagttaacaaagaaacagaacaggtagttttattagatcataggaatgtttgacaagatggaaaataagagtcaaagatatccaaaactctgagaaaaatagcttaaatcttctgaggcaaagtgcatctttaaaaatcttttttttttttttttgagatgaagtgtcactctgtcacccacactggagcgcagtggcacaatgttggctcaatgcaacctctgccttctgtgttgaagtgattctcctgcctcagcctcttgactagctgggactaaaggcgtgtgccaccacgtctggctaattttttgtatttttagtagagatggggtttcacagtgtaggacacactggtctcaaactcctggcctcagacaatccacccacctcagcctcccaaagtgctgggattacaggcatgagccaccacacctggccaggagatatatttctaatacaagcaatgtaattattacaaaagggatataaaagctaagatctccatttctgtgcccaaaaaagattggttatctctgacccattaaacccaaattcagacttatgtacacacctgtaaagcactaaaacttttatttcagtaagaaataaagtaggctgggtgtggtggctcatgcctgtaatcctaacactttgggaggtcgaggtgggtggatcatttgaggtcaggagtttaagaccagcctggccaacatagtgaaactccttctctactaaaaatacaaaaattagctaggcacagtgacacttggctgtaatcccagctactcaggaggctgaggcaggagaatcacctgaacctgggagggcagaggttgtagtaaacagagattgcaccaccgcactccagcctgggcgacagagcaagaccctgtcacaaaaataataaataaataaagtaagtaggctgggtgcagtggcttacaccataatcccagcactctgggaggccgaggtgggtggatcacccgaggtcaggagttcaagaccgggctggccaacatggcgaaaccccatctctactaaaaatacaaaaaaaaaaaaaaaaaaatttaactgggcatggtagcaggtgtgcctaataccagcaacttgggaagctgaagttgcagtgagctgaggtggcaccattacactctagcctgggtgatggagtgagactctgtctcaaaaaaaaaaagcagaaataaagttaagtactacaaaaagatgcttgctgtcatgggtaaacaactctgccactggatctcaaacatgatagtatattagattcaccttcagtgattctgaaaacacagatgactgggctccaaccctggagtttccaatttactacatcaaagaataggggaaggaagatgtatatttcttacagcacaaagctgatgctgttgatgaagtttccaggattaccacagtaaattaaaacatactacagcagggactgttactttgggactgtctctgttattccccactgttttcagaattgacaagcaagcatgtaacatacatctgccctataacaggctacaagaaatgatgctagtgtttatttttatttttaatgtatttttttttagacgaagtatcactgtgtcgccccggcaggagtgcagtggcgcaatctcagctcactgcaacttctgcctccttgttcaagcaattctcctgtctcagcctcccaagtagctgggattacaggtgcctgccaacaagtctggctaatttttgtatttttagtagagatggggattcactattttggccaggctggtctcaaattcctgaccgcatgtgatctgcccgcctcggcctcccaaagtgctgggattatagatgtaagccaccacaaccggcctagtcttcatttttaggatttttttttttgagatggagtctcaatctgtcacccaggctggagtgcagtggtgtgatcttggctcactgcaagatccgcctcccgggttcatgcaattctcctgcctcagcctcccgaatagctgggactacaggtacctgccactatgcccacctaatttttttgaatttttttagtagagacggggtttcacagtgttaggcaggatggtctccatctctggaccttgtgatccgtccacctcagcctcccaaagtgctgggattacaggcatgagccactgcgcccggcctagaattttttttttaagagacaaggtatcacaatgttgcccatgctagtatcaaactcccaggctccagcgattctcccacctcagcctcccaagtatctgggactacaggtgcaggccaccatgccaagcatagtgatgttactcttacccacagaggccaggttcatgtagttctccagcatcacatctctgtagaggtatttctcagttgtgtccagtaaagcccactcctctggggtgaagtccacagccacatcatcaaacgtcactgaatcctatgtcatcatacacatgctggtttgagccaatgaacacttccaccaatattcactggagaatgatgaaggggaaccttatactcacttacacgtggttgtcaggtctcccatgatctactccagggtttaatgtctcaggagctcttgtgtctaaacactcaaggttgacctcctacaggcatatgccttaaacagcactttttaaaatttttttaaatctttttttgctgatctatttttaattttttaatatttgtatttttaaattttaaattttatttttattttgattagaacagtacttcctaaagatgaattttcctctatctatcatctatctaatctgtttatttatttatatataaaaacagggtccaactgtgtcacccaggcacaactgctgattactacagcttcgatctcctgggctgaagtggtcctctcacctctgtctcctgagtagctggaattacaggcatgagccactgcacactgcttacgcttgatctcagcacaaccaggctaggagctcttcctgtcccattggtgtctatgcagcacactcctcagcacactgcagatacctgataaatgctgataagtgaatgatttgataaaaggacactttcatctgctttatcatccgtcaccgcacccagcaatgtaagaaagatgcagttggcaccatgaaggtcaagcttaagtagtaattactgagctactggactgattttcaagttaacattttatgtataggagacttcattccctggggaaattcatctggggactcagtccttgagtaaggcttcatttgctctaagaaaactctgaagatgagtctgtctagaaagaaatctgtctacctattggatgaaagcatatcatttttaacaacagtacgttttctgcttacctgataaccacttgccaggtagtcctccaccatcctttctacctttgtcttttcttcaaaagggcagattggttccctggaaaaaaaccctagtggaaaagtaagaaggcatgagaagccagagctgcccatccttcccacattctcatgcctagaagtcattccatcctagcttgaaattccgatatgctcctacacactcgagaaaactacacacacaacacttccatgaaatgccatagtaagtcctgtgtcagctagacacaaaagcagacttgggccaaactgcctgttgggtaaagggtaatagtttcatttttcaaggaaacttacaccctgaaaaatgtgactctcgtccaggtgcggtgcctcatgcctgtaatcccagcactttgggaggccgaggcgggtggatcatgaggtcaggagaacgagaccatcctagctaacacggtgaaaccccatctctactaaaaatacaaaaaattagccagatgtggtggtgggcatctatagtcccagctactcaggaggctgaggcaggagaatggtgtgaacccaggaggcggagcttgcagtgagccgagatcgtgccactgcactctagcctgggtgacagagcaagactccgtctcaaaaaaaaaaaaagtgactctctatctgcccatagtagtaacactcatgaagcttatgtagcatttcctaaggtacacaaaccagggctgaattctaaaacagcattctggctgggcacagtggctcatgcctgtaatcccaatactttgggaggccaaggcgggcaaatcacttgaggtcaggaatttgagaccagcctggccaacattatgaaaccccatctctactaaaaatagaaaaattatgggaggctgaggcagagaattacttgaacccaggagacagaagttgcagtgagtcgagaccacaggcactgcactccagcctgggagacagagtgagattctgtctcaaaaacaaaaacaaacaaacaaacaaaaattagccaggtctggcagtatgtgcttgtggtcccagatacttgggaggctgaggcaagagaatcacttgaacctgggaggtgaaggttgcagtgagctaagattgcaccactgcactccagcctgggtgacggaacaagattctgtctcaaaaataaataaataaataaataaataataaaacagcattctgttctgtggttcacttcaattcctcctaaaagaaccagctgcatgcctgctcaggctcagctcactggacgcttgtgttgtggagggtgacctaaagcagaatctctgaaaaagagcatcaacaaagacttaccacgggacaaataaatggctgccattctctgaagctgatggtgtgatgatgtgcatcccttccttgatgccaagatcacctcaggccagcttatgaatctaggtggatagaggcaatctccattcctctttgtacagggttatttgcggtcctgttcatatcaatcatcaaacaacaagcatgaaacatcagtcatcaaacattatgcctgagctttgtctctgcaggtgacagatgtgaaggccaccaaaaattgcccactcagtaccgtcactcagtaacaaaagtattaataacagtaactgacatttactgaggactgatatgtcagaagtagctctagtagctttatatatacatgctcagttaattatcatagccatccttcccagtagctatcattacctctatctatctatatctatctatatttatctatctatatctatctatctatatatctatctatatctatctatctatatctatcctatctatctatctatctatctatcgagacagggtctcactctgttgcccaggttgaaatccaatggcactaacacaactctctgtagcctagacttcccgggctcaagtgatcctcccacttcagcctcctgaatagctgggaccataggtgcgtatcatcactcattattattattattattttgagacagagtctcactctgttgcccaggctggaatgcagtggcatgatctcaactcattgcaacctctgcctcccaggtgcaagcgattatcaggcctcagcctcccgagtagctgggatttcaggtatgcactaccatgcctggctaatttttgcatttttagtagagacgcagtttcgccatattggccaggctggtcttgaactcctggccttaagtgattctcccacttcagccccccaactagctgggactacaggtgcacaccactgggtccggctaattttttgtagttttagtagagacaagttttcaccagattgcctaggctagtctcaaactcctgggctcaaacaatcctcctgacttggcctcccaaagtgctgggataataagcataagccacgatgcctggcccattacttctatttaatactgaaaaaaacctacactcaaacaaccctagtagtcggtctgatacttgtccctagagcctgatctcctgtatatggtgttacccccccgccatatgaccagaagacagtgcagacctgcacagaacaattcagtagtcaccagccacgtgtgttattgataacttcattacgtacctaagatgacttaagaacaaaatctaaaattttcaaaagtcggccgggtgcagtggctcacacctataatcccagcactttgggggaccgaggcagacagatcacctaaggtcaggagttcaagaccagcctggccaacatggcaaaaccatctctactaaagatagaaaaagtagccgggcgtggtggcacttgcctgtaatcccaggtactcggaaggctgaggcaggagaactgcttgaccctggaggcagaggttgcagaggttgcagtgagccgagagagcgcgcagcctctccgaactggacgcacagggaggactgatagtccctggagaagcgagtgaagtgaagcggatctgagaggctcctaggcgacagcgcgcaatcattcctttgccgccccctgctatccccgggaccgccaaggaggtggaactcaccacagcctgggcagactccaccaccataaaggcgaaaccgcactgacggagaggagccagcgccggaaaagatggcggtggtgcgctgacgtcacttccgcttcaacactctggccgggcgaggctcgtgggctccagtttcagccacgtaggaccgggtagaacacagaaattctagtttcctctcgggtgggtgcagaaagggcctggggttggctcagggagggggatgcagaactaggtccagagaaaaaggtgaggttagaaccgggcctccagacggaactgtgggcgaggggaggggctcgtactcggggggtgatttagaggagggacccggcctagccggtggttcaggtggccggtcgggctggaagggcggggatgagggatgggacgcatccccgggggatgctcctccaaagcttttatcgggcgagcgcagtggctcacgcctgtaattcctgcactttgggaggctaaggtaggtaaatagcttgagtctgctgggaatgggtgctcgcttggtgtcacaaaatcaacactgagacaaaggatctcagcaaggctagttttactttctgcagaatgggtgccactggctggcagtcttgccaccagagcacacattaacaaaggagacagggtttttttaaacttgaagtgtccatccttctgctgtgtccagcttccattggctggaacgggacctcaccttcctgtacttcactggattggctagcaacttagaacttcccaaaagaggcaatggcagaggagaacaaaggaagagaggaagtaacttgtggactgttgagagaggcaaaaacacttctaaatagggaaaggaataggccatgacctaatagttgcttggaccagttcaggcatgccagggcaaatatctaggctaaaatgtgggagctaaaaacagagtctattgatttctttattacggctggcagaatttaacaatattaccacaggtctttgagaaaatttggcttctaagagggattactatttatttcaatcagactgggaggaaagtccctttgaagaggaacctgtatttatttcattttctacaagtccaagagtttgagaccagcctgggcaaagtagcaagaccctgtctctctctctctctctctctctatatatatatatataaacatatatgtataaatacatataaatatataaatatataaaaaatatataaatatacatgttcaaaatgcttgttccctggtgccataaagaaattagcacttgaacataaatttaatttactcagcaaggccatttttacttcctgcagaaacggtatactcaccagcagttttgccacgagagtacaccaaacaaaggagatagggtcatttataacctgatgcttccaacctactgctgtgtccagtttccactggctggaatgggacctcacgttctggctagcaacttataactttttaaaagaggcaagggtagaggagaacaaaggaaggaggaagtaacttgtggaatgctgagaagggtcaaaacatcttcaaataaggaaaaagaacaggctatgccctaatgcttgcctggaccagtacaagcatgccagggcaaatatgtagactaaactgtgggagctaagaatataaagtacattgatttctttatcacggctcacagatacttgagaatgttagcacaggtctttgaataaattttgcttctaagagaagttactatttattcctaattaaatgtgaaggaacgtctttgaagaggaacctctgctttactttttagatataaatataaagcttgtttgtatgcctctcctcatgttcctagagcctttccatgattcttccatattgataaagctgccaatgaatggcatggtctatcccttccattcagtcagagtttctgtaggcctttttttcttcattctttattttttagaacctgctgattccattgggttttctttttctttcttgcttgcttgcttgcttgcgacagatctcactggatcagaccaggctggagtgcagtggtgtgatctcagctcaccgcaacctccacctcccaggttcaagcaattctcctgcctcagcctctggagtagctgggattacaggcgcctgccaccacgcccagctaatttttgtatttttagtagagaacgatttcaccaggttggccaggctgatctcgaactcctggcctaaaatatctgccaggccaagatggtaggatcgtttaaggccaggagtttaagacaagcctgggctacacagcaaaaccccatctctctatatatatataaaaaaaatttaaattaaaaaatgttttgttttgttttgtttttttgagacatagtttcgctctgccacccagactggagtgcagtggtgcgatcttcactcactgcaaactctgcctcctgggttcaagccattcttctgcctcagcctcctgagtagttgggactacaggcatgtgccactgcgcccaactaatttttgcatttttaatacagacatggtttcatcatattgacccagctggtctcaaagtcctgacctcgtgatccatccacctggtcctcccaaagagctgggattacaggcatgagccactgccccagccaaaaatatgtatttctgttgttatttttctgatcttaccacatgggccaggaacacatttcctacgttgtaaaatagcactgataccagacattctccccaagattattcagaaatgtaacatactcccaataaaaataccaaaagtttttttctggagttaagtacattgatactgaagtttatgtggaggaacaaacatctgataataaccaagaaaacaaaaacaaaagcaatgatgagcagcagatattaaaacatactattgacagttttcatgcaaggcaaagaattacattattttaaaataaaaataaagtccgggcacagtggctcacgcctgtaatcccagcaatttgggaggccgaggcaggcaaattacctgaagtcgggggtttgataccagcctggctaacatggtgaaaccctgtctctactagaagtacaaaaattagcaagcgtggtggcacatgcttgtaatcccagctacttgggaggctgaggcaggagagttgcttgagcctgggagatgaaggttgcagtgagccgagattgtgccactgaattgcagcctggctgacagagtgagactctgtctaaaaaattaattaattaattaatttaaaaaacatactataaagcctctataattaaaactatgtggtactagcacgtgaaacagaaactaataaaatatcaaaaaatagacccatgaacatgtagaaatttggttcataaatgtattttgccagatgcggtggctcatgcctgtatcctagcaatttgggagactgaggcaggaggatcacttgaggtcaggagttcaaaaccagcctgcccaacatggtgaaaccccatctctattaaaaatacaaaaacatagccgggttcggtggctcatgcctgtaatcccagaactttgggaagccgaggcagccggatcatgaggtcaggagttcgagactagtctgaccaacatggtgaaatcccatctctactaaaaatacaaaaattagctgggtgtggtgatgcatgcctgtaatctcagctactcaggaggctgaggcaggagaattgcttgaacccagaaggcggaggttgcagtaagctgagatcgcaccactgcactccagcctgggcaacagagtgagactctgtctcaaaaaagaaaaaaaatttagccaagcatggccgagcatgctggctcatgcctgtaatcccagcactttgggaggctgaggcaggcagatcacgacgtcacgagatcgagaccatcctggccaacttggtgaaaccccgtctctactaaaaatagaaaaattagctggcatggtggcgggtgcctgtaatcccagctactcaggaggccgaagtaggagaatcgcttgaacccaggaggcggaggttgcagtgagccaagatcgctcccctgcactccagcctggcgatagagcgagactccgtctaaaaaaaaaaaaaaaaaaattagccaagcgttgtggtgggcgcctgtaagcccagctactcgggtggctgaggcaagagaattgctcaaacctgggaggcagaggttgcagtgagccgagatcacgccatttcactccagcctggcgacacagcgagactctgtctcaaaaaaaaaaaaaaaaaaaaaaaaaaaagccgggtgcattggctgatgcctataattccagcacttttggaggcagaggcgggtggatcacctgaggtcacgagttagagaccatcctgaccaacatgaagaaaccccgtctctgctaaaaatacaaaattagctgggcatggtggcacatgcttataatcccaggtactcaggaagctgaggcaggagaaccgcttgaacccaggaggcggaggttggggtgagtggagatcgtgccattgcattccagccagggcaacaagagagaaacaccgtctaaaaaaaaaaagtggcatttcagataaatggggcaaaaaatgccatttgtaacaaatggaaggtctaagatagctggttagccatctgagaaaagatgaaattaaatccatacttcacagcatatacaagaataaactccaagtggactagggatctaagtgtaaaaaataaaaccacacacgtatttagggtgtttaagtgatttcttggctgagtaaggaaaaagatgttaccacaaggcggcagtagcacacaagcttcatttgggatgtgctttgacaggttagcagtgggggaggtagcaaacagcaagagaatatccacaggcttctacctgtgggtcgctgctcagaaagggtggaaaggaagaaagactctcagaggagaaggggaatcaaagagggggcttataaataactaaatgatgatattcaccagactggcagcatatcttccagttaaaaagctctgaaggataagtctggccaatatggtgaaactccgtctctactaaaaatacaaaaattagcaggtatggtgccaggtgcctataatcccagctacttgggaggctgaggcaggagaatcgcttgaacccaggagatggaggctgcagtgagctgagattgtgcccctgtactccagcctgggtggcagagcaagaccctgcatcagaaaaaaaaaaaaaaaaaagctctgaaggaccgcaggggtatggggttttcatagccctggagttatcttatctatggctgtcagatattggatataatttcagagaatacaaagcaggcgcactcgaaatggctaaaaataggcttgttcaggctatgtttcaaacaatccagtgtgttaaaattgcagtttggcaggggtaggctattgtgaatactagtgagacaaacattggtgtacaaatatctctgagtccctgctctgaacagttttggatatgccaaagtggaatatctggatcacatggtaattctgtttaatcgttctttttttttcttttttttgagacagggtctcactctattgtctaggctcgaatgcagtgacgtgatcatggatcactgcagtcctcaacttactgggctcaggtaatcctcccacctcaacctcccaggtagcagagattacaggtgcatgccaccaccatccttggctgaattaaaaaaaatttttttgtaaagaccatatttcaccatatgcccaggctggtcctgaagtcctaatctcaaggaatcccctggcctcagcctcccgaagtgctgggattacaggtgtgagccatcacatccagcatggttttgattttcattttcatgatgtttagtgatgttgagcatcgtttcatgagcatcttttcgtgtgtttattggccatctgtatatcttctttggtgatattattcaagtcctttttctgtattgaaatgagttttgttgttgttactcttgggttctagaaattttaaaaataaactctggatatttgtccccagtcagatacaggacttgcaaatattttctcccatttgtagattgtctttttactctcttgttattatgctttgatgcacaaaatttgtatcattgattaggttcaactcataatttttcttgtgttgcctgtgtggttgatgtcataactgagaagtcatttccagttgaagctttctcacctatgttttcttctaatagttttccagctctagctcttacactacactaaggtttttgatccatttttaaaaaatcatgccacattattattattattattattaagatggagtcttgctctgtcacccaggctggagtgcagtggcacaatctcagctcactgcaaactctgcctcccaggttcaagtgattctcctgcctcagcctcctgggtagctgggattacaggcgcctgccaccatggccagctaatttttgtatttttagtagagatggggtttcaccatattggctatgctggtctcgaactcctgaccttgtgatccacctgccttggcctcccaaagtgctgggattacaggtatgagccaccacgcccatccttcatccattttaagtaaatttttatatatggtataaggttagggtccaactccattcttatgtatgtctatatctcagttcctcccccatataatcctgtccccagggaatcaacaacccatgctcttcctagtcacctccttgaacatgtccctcccccaggaaacctccaacatgagatagaacaatgtagaaaggacattcaaaacttccctttcccttgtttgtcaaaggaatccgccccaacggttgtccccttaagggaagtcccactggggggagggggcattggttgcattaatgccctcttaaccagctcagaagtcagaaacttcaaaagggaactcaaaccattgttagatgacccttattgggtagcagatcaaattgatcaatttttagggccacagttgtatacttgggctgaactaatgtccattttagatattcttttctcaggggaggaaaggactgtgatccacagggccactgtgatagtcagggaacgtgaacatcctcctggccaaaacgttctgcagcggaccaaaaatttctgttccaagaccctcaatgggacaatcacaatgcagctcaccaagaaaatatgagggatctcggggaaatgataattaaaggaattcgggaaccagtaccctgaactcaaaatatttcccgagcattcaacatacaacaaagaaaggaagaagagctcatggaatttttaaacagactctaagagcaagttagaaaatacgcaggcttagaaataagaagatccacttcggcaaggattgttaaaactccactttgtcaccaacatttggccagaaattacaaaaaaattgtcaaaaaaatagagaattggaaagatagctccatagaagaacttctaaaggaggcccaaaaggtatatatgagaaaagacaaggaaagcagaaacaaaaagcaaaaattccactgcccacccttcaacaagggacacaaggaaataggtcccataaatgttctaagccactagctgcaaagtcacatacaggaaagaaaagggataaaacctggggacctaacggcaagaagggaaaagggggaaaataaatgtttcagatgtgggaaactgggacactttaagacagaatgtcccgaatgagaaagagagagaaatcctcccactcatgacttttgaagaagaatagggggttcagaggctctgtctcttttatctcaaatcccaccaatagcccttgataaatctacaggtgggacccaagctagaaattttcactttcctaatagattcaggagtagctcgctcctctgtttgctacctttcatcaaatgtagcctgctctgcagaggagctgttcgtcacggtggtaaagggggaaaggtttagaacaaaaattttggaggaaacagaagttaaattcaagaatagatcagccgccattaaattcatgttaatccctgatgcagggacaaattcgttaggaagggacttaatgtttaaattggggataggtctatatgttaatcagggaaaattatttacttccttaaacttgcttaccgcccctaaagaaagccaaatccaccctgatgtgtggttaaaggagggaaatcaaggaagattcaagttccgccaattcatataaaacgaaaacctcctggggaaatagtaaaaagaaaacaacaccccattcccctagaaggcagaatgggtttaaaacctataatcaaaggtctcatccatgacagactccttgaaccctgtatgcctccttataacactctaatgttgcctgtaaaaaagtcacatggatcacggctagtgcaagatatctgggctattaaccaaatagtccagactactcaccctgtggtccccaacccttataccattatcagcaaaatcccatatgaccaccaatggttcatggtaatagacctaaaagatgccttttgggcttgccccttagcagaggacagccaggacatgtttgctttcaaatgggaggaccctcactccagttggaagcaacagtactgatggacagtcctgccccaagagtttgtggactccccaaatctatttggtcaaattctagaacaagtcctagagaattttcccctcccctcatccatatatccgctccaatatgtggatgacctgctaatttcaggaggcaccaagggctgggtaacagcagtatcaattaactttctaaattttctgagggaacgcggattgctggtctcaaggagtaaactcgtttgtggaacctgagataaaatacctaggatacttaataagcaaaggcaaacagagattaggccccaaacgaactgaaggaatcatagccgtacctttgcctgaaacaaaataagggcttaggaaattctgggggttgactggatattgtcgcttatggattgactttatgctttaaaaacaaagcctctatgcctgaaacttactcaagagagacctgatcctcttctttggacaccacgggaggtccaacaagtagaggaattaaaacacctgctcataactgccttagttctaccttccctagaacagccattccacctcttcgtcaatgtgaataaagggatagctctaggggtgctcacccaaacacacgggggccaccggcagcctatagcctttctgtcaaaaattcttgacccactaacccacaggtggcccgagtgtatttaatctgttgcagcaactgccctatttacagaggaaagcaggaagataacctttgggggaaacctcactgtaaacacaacccatcaggttagaaccatcctaaaccaaaaagcaggcagatggcttaccgattcaagaatcttaaaatatgaagctatcttactagaaaaagatgatttaaccctaaccacagaaaaaacactcaaccctgccgctttcctaatgggaaatccaatccccaggaccctgaacataaatgtctggatctaatctgttatcaaactaaagtcaggcttgatctaagcgagaccccattcaaaacggggcaacacctgtttatagatggctcctcccaggtatttgaagagaaaagacacaatgggtactcggtagtcaatggggaagccctcacagaggtaaagtcaggaagactgcccaataactggtccacccaaacatgtgaattgttcacattaaatcaagccataactgggaaagggactatttacactgactccaaatatgccttcggggtagtccatacttttggaaagatctggactgaataaaaggccaggaccttgtccacaaggagttaatcactcaggtattggaaaatctccagctaccagaagagatagccatcctgcgtgtcccaggacaccagagaaatatttctttcaaaagccaaggaaataaacttgcagaccaaatagccaaacaagctgcctcttctcccaaaatgcccatttttcacctaaccccttgtctttcttccccaactgcaattcacatcttctctcccactgaaaaagagaaattaaggaaaataggagctaaagaaaactcagaagggaaatggatgttaccagaccaaagagaaatgctatcaaaacccctaatgagggaagtcctatctcaactgcatcaagggactcattggggacctcaagctgtgtgcgatgcagttctcagagtttatgggtgtataggagtttataccctagcaaaataagttacagatagttgcctaatatgtaagaaaactaatttaaaaaaaccctaaggaaaccaccttttgggggaaaaagcccaggattgagaccattccaaagtgtccaaattgactacaccaaaatgcccccaataggccacctaaagtacttgctagtaatagtggaccaccttactcactgggtggaggctattcccttttcaagtgcaactgctaataatgtgattaaggcattagtagaaaatattatacccaggtttggactgatagaaaacattgattcagacaatgggacccacttcactgcacatgtcattaagggactagcctaagtactaggaataaaatgggaatatcatactccttgcacccaccctcataaggaaaagtagaaaggatgaaccagactctaaaaagccacctaaccaaatcaattttagaaactcagttactatggactaagtgccttctcactgccttattaagtgtctgaactgcccctcagagagatgttggcctatctccctatgaaatcctatatgggttgccttatctacactctactactgacattcactgaaacaaagtttgtttcatttgaaacaaaggatcagttcctcaaaaattatatactcgatctgtcttccactttctcttccctcaggatgaaaggcttcctagcacaaacaccacccctggagttcccggtacatcaataccagcctggggatcacgttctcatcaagagttggaagagggaaagcttgaaccagcttaggaggacctcatctggtactcttgatgaatgaaacagcaatctgaatggctgaaaaaggatggacccagcactccaggtaaaaaggaccccacccttacagagtcatgggctgtcactccaagaccaatgccttccaagttagtattcaaaagggtctaatctgtctttcccttcttcccttaactactcaaggacacttcattatcaatgtaaccagatcactctctcctcaaacaatcacgtttgacgcatgtcttgccatacactttggggacctccaaaaccagaagcagctatcctccttgtagaaatatctctgtccttccagggtagattctaacctcttacattcacgcaactcttgcttggtagaagccgaaacccttacgttttgggaaaggttctgctccacctggaacaatgtcctatggactactaagcatcaagggtggacctccccaggaagctgcgcctctttaaaaccatatcttcgtttcaccaaaggaaatgccccctctaattgccaacatcatcaatgcaacccagtgcaaatttctatcttacccctacctccatcgatcttgagcccactttaggtcttttctatggcataggaaccgaagtgggctgagacagatcccatagggtcctttgaaatgcgctttagcaacccttccccacctcctaggggtaacccctctccaaaccctcctccaaatcaaacaactattttgccactacctaatgacaaaactaaagtggtcatagtggaagtcaaagacttaaaccctagccattgaaaccgggtatcaggatgcaaatgcctagctggaatggattaaatattccgttcatactctaaacaaaagtgactgttacgcttgtgcaacaggtaggccagaaacaaaaatagttccttttctgcttggatggtctaaccaaccgggtatggactgcatggtagctctttccagcatcccacagcctggggtaataagtcatgcggcactctcttactgcttttcccagaagtgaaagaccgccctgtgtgtcagcccccaagggccatccagctcccagcgtctgatgccaatttttcctcatgtctctcacaacagggagaaaacttggcattctttgggaatctaacaggatgcagtgaacccaagccttttgaagagctcaccaatcagactgcccttgtctatccatgagcagatgtttgatagtattgcggaggccctctagtgggtatgctgccaagcaactggagtggcacttgggctctaatccagttgtctatccctttcaccctggcatttcatcagccaaacaaaaaccaactaactcagaaaaaaaggaaagcccctcaagggtcctttgaccccgatatctacatagatgctatcggggtcccctgaggggtaccaaacgaattcaaagctcgaaatcaaatagctgctggattcaagtctgtccttttcttgtggtctactataaataaaaatgtagactggataaattacatatactataaccaacaacgatttgtcagttacaccagggatgccattaaaggaatagctgaacaattgggtttcaccagccaaatggcctgggaaaatagaatagctcttgacatgatattagtggaagtccaatgttgtacctgtatccccaataatacagcccctgatgtaactatcactaagggtctataaggcctcaccactctaggaaatgaactagctgaaaattcgggaatgaatgatccctttacaggtgtaatggaaaaaatggtttggtagatggaaaggactaatggcctctattctcacctcccttgtgatcataataggggtgctcattctcttagggtgctgtattataccctgtgtctgcggactagttcaaaagctcatagaaacagcccttaccaagacctcccacaactctcccccaccctattcagataaacgtttatttctaagcaaccaagaagagcagtgaagccagatcctgttagaaatatatgaagaggaaggactacaaaatcaaaaggggaaaattattagacaaaatgagttgctctacaaaggtccaacttcgttgtcctttgttctgtaacctttgttctgtaaactgcccttcccgcagaaactgtctttcccgccgaccaaaactgcccttcactatcactgtaatccatacccctactctatttgaaactgccaatcgggatcagcttacattgtgtggttcaaccaccagccaatgaggaaaaaacacagaagcaaaagctatgatgcattagggttaaaaaccccttcctttccctgtccaatgtgctcttgagactgctacaggcgcaagcagccaccttctgcagaagtaaaccttgccttgctgagaaatttttcttttgagtgctggtctctctctgtggcaccaagaacttatttctaacatggagtgatttccaagatagatggttaagtgaaaataaaaactgttgccaggcacggtagctcatgcctgtaatcccagcactttgggagtctgaggaggttggattatttgaggtcaggagtttgagaccagcctagccaacatggtgaaatcctgtctcttctaaatatacaaaaaattagccgggcgtggttgtgggtgcctgtaatcccagctacttgggaagctgaggcagaagaattgcttaaacccaggaagcagaggttgcagtgagccgagatcacagcactgcactccagcctgggtgatagagtgagactcggtctcaaaaacaataataataataataataatacaaataaaaaaatgaaaataaaggccaggtgctgtggctcacccctctaatcccagcactttgggaggctgaggcaggtggatcacaaggtcaggagttcaaaaccagcctggccaagatggtgaaaccccgtctctactaaaaatacaaaaattagctgggcacagtggcaggcgcctgtaatcccagctacttgggaggctgaggcaggataattgcttaaacctgggtggcagaggttgcagtgagccaagatcatgccactgcactccagcctgggccacagagtgagactccatctcaaaaaaaaaaaaaaaaaaagaaaagaaaaagaaaatacataattatctgtttattctgagtatagggaaacactgataggattattctgaaaataataagattcagaatctattggggatggatgggaacagctagaacagaatggtggggtaagaacaagatggaggctgggcgtggtggctcatgcctgtaatcccagcactttgagaggctaaggcgggcggatcatgaaatcaagagatcaagaccatcctggccaacatggtgaaaccctgtctctactaaaaattcaaacattagccaggtgcggtggtgcatgcctgtagtcccagctactcaggaggctgaggcaggagaatcacttgaacccagaaggtgaaggttgcagtgagctgagattgtgccattgcactccagcctgggcaacagagcaagactctgtcccaaaacaaaaacaaaaacaagatgtagaggatagggaaagggaaacctctctgagctctctgagcataacattctgttagttcttattacgcatgtccaagtaaagagaccaccaagcagtctttgagtgagcaacaatggctgtgtattacatccgggtgtggacgggctgagtctgacaaaacagtcagcaaaaggtggtgggattatcattagttcttataggtttgggataggtagtggaattaggagcaattttttttgcaggcaggaggtggatgttacaaagtacattctcaagggcggggaggatgttacaaagtacattgacaagggtggggagggtgtattgtcacaagggtggggtacattcacaagggcagggaggatgtatcctacaaagtacattcagaagggtgggggaatatcacaaagtacattatcacaagggcagggggatgtcacgatggcttgatcatgatgcggccagctcagaggaccttacattcctgcctttttatgttaataatgcaggtggactgcaggtggggtactatagatgactaagtagggtctggtccattgaggttgtagagtttgaggggtcaaattcttaacaagaactgattgtccagctagggcgtcttcatatggctgggaatctggagtaggcaagagaagattagcagcctggcgaatttcctgtctagcctgctggaggactggaagatagtcacctagagggctggtgtctggcaagaggttggggcctaacaagaaggtatgtccatataaaacttcaaatggactataccctgtagcttcttgaggataggctctaattctaaagagggcaaatggtaacagtactgtccagtcttttttaagttggagactgagcttggtgaggtgtgtttttaacagactattagttctttctacctttcccaaagattgaggatggtaaggggaatggaggttccactggatgccgagggcctgggagatggcttgtgtgatctgactaatgaaggccagtctgttattggactctatagaggtgggaaggccaaaccgaggaattatgtctgacagaagggaagaaatgaccatggtggccttctcagaccctgtgggaaaggcctctatgcatccagtgaatgtatctacccagacaaaaaggtatgttagttttttgactcagggcatatgagtaaagtcaatctgccagtcttgggtgggggcaaatcattgagcttgatgtgtaggaaagggagggggcctaagatatccctgaggggtggtagagtaacagatggaacaccgagaagtaatttccctgagaatggatttccatgatggaaaagaaatgggaggttctaagagatgggccattggcttgtaaccaacatgaaagaggttatgaaaggacgataagatagaatgagactgtgaggcaggaaggaggaattttccttgatccaagaaccatttgccttgagtaggaagggattgataggtcatagttttagtgggagtataggtggaagtgatagatgagaaggaaaaaaaatggccatgagggacagatgtgggaatactagctgcttcttttgctgcattatcagcataagctttgccttgagcagtgggatctggtgacctctgaggccccttgcagtgaatgactctggcttccttgggcagtagagcagccttaaggaggatttttattaaggaagcattgatgatggaggacccttgtgtcatgagaaaaccttttcctgcccatataatagcatggtgatgtaggatgtggaaggcatacttggaatcagtgtagatattgacacatagtccctttacaagggtgagagccccagttaaagcaatgagtttggcttgttgagaggtaatggaagggtgcagggcagtagcttcagtgaccgatgtggaagacaatacagcatagcctgcccttgttggtgaccgacgatttggccttgaactaccatcaataaaccaagtgtggtctggattagcaacaagaaagagggaaatatggggaaatgtggaggatgccatatggattagagagatacagtcatgaggttcaggtttggtgctaggtataaggtgagaggccgagttgaagtctgtgccaggaacaatggtaattgtgggagtttcaatgaatagtgagtacagttggaggagtgtgggggcagaaagtatatgcaccaagtgtgaggaggaaaatagattttgaaaattatgagaactgtagagtaagtggggcatggtttgtgatcttgagggcctctgaaagtattgaagtggtggctgccagcacacatagacatgaggaccagcctagaactgtgaagttaagttgcttggataggaaggctacaggctgtgggtctggttcctctgtaagaactccaaccacacagccttgtatttcagccgtacataaggagaagtattgggatgagttagggagtgctaatgtgggaactatttctagggctgtctttaaggaatgaaaagaagggtgggaaaaacttaggttctatggggttggtcaggtttccctttatgagtttatgtaggggtttagttaggatggcaaaacctggtatccaaaggcaaaagtatccaaccatgcctaggaaggaaaggagttgttgctttgtagaaggggttggggtttcagagattagctggacccagttagcagggagaacacgtgtgttttgatgacagactatgccaagataggtaatggatggagaagaaatttgggctttagagggggatacatgattcccctttgagaatagatgttgaaggagcaggagggtatcctgttgggaagattcataagaggggatgcagaggagaaggtcgtccacatattgaataaggtgagaaacagatggacagaaagaaagtaaatcatgagaaagagcttgactaaagtaatgggggttgtctctgaagccttgtggcagtacagtccaggtaagttgctgagattggtgggtgacaggatcagtccatgtgaaagcaaaaagaggtcgggatgaggggtgcaaaggaatagtgaagaaagcatctttgaggttgaggacagaataatgagttgttgagggaggtattgaggataggagagtatatgggtttggcaccacggatggataggttagacaatttggttaataaagcaaagatcctgaaccaacctgtaagatttgtctggtttctggacaggtaggataggggagttgtaagaatttgtaggctttaaaaggccatgctgtaacaggagagtgatagcaggctttagtccttttaaagcctgttgtgggatggagtactggtgttgagtggggtaagggtgattaggttttaatgggatggtaaggggtgcctgatcagtcaccaaggagggcatagtggtatcccatacctgtggattaaggtagggagacatgagacgaggatgcaaaagaggcttggaatcaggcataaggacagcaatgaggtgtggctatagtccaggaatagtcaaggaagcagataatttagttaaaatgtctcagcctgataagggaactgggcaggtagggataactaaaaaagagtgcataaaagaatattgtccaagttggcaccagagttggggagttttaaggggtctagaagcctagccatcaatacccacaacagttacaggggcaagggaaacaggcccctgagaagaaggtaaagtggagcgggtatcccccatatcaattaaacaggggatggacttaacctccactgtaagagttacccaaagcttggtgtccatcatggtccagggggcttctgagatgattgggcagcatcagtcttcagccgctaagccaaggagatctgggaaggagtcagctaaggaacgttggatttgagctccaggagctttaggagtggtggtcatgtgagtcagagagtctgacttccagtgggggccctcacagacagggcacggcttacaaagaatcccaagatatggtggcacttggcagctttttcttggttactgaacaccttgaaggcgaggttgattaaatcctgttgtggggcttgagggctggaatccaatttttggagttctttttctaatgttaggagtggattgggtgataaaatgcatattaatgataagggggccttctgtcccccatgggtctagggctgtaaagcatctaaaggtaactgctaattgggccataaactgggctgggttttcgtctttacattgggtagttttctttagcttgtcataattaacagcactgtatgctgcctttttgagcccctcaactatgcaggagaccatgtaatcttgcctagctatacctggggattccgtctggtattgccaatggggatcctctcagggaattgccctggtgccctcttggaggtctggctcatgaagccagtgggtgtctttgtaggactgggctagaaaataaactctttctcgttcgtctgggaagggggtaaaggtcaggatgacatttaagtcactccaggttaagttgtaggactgagttagatattggaattcctgtatatatttagtggggtcctatgagaaagagtctaaatgctggctcatttgggaaaggtctgatagagaaaaaggcacatgtaccctcactatgccttcagctccagccacctaagaggaaatttttgggcatgtgggggagagctagtcacagaacaaaactataagccagacagggtgtgaggaggggaggtaatagaagcgttatagggtggggtagcagaggctgcagaagaattgggacccaattcagcctggcgaggagcagctgggggaggaggagagaggtcagaggggtcagtggaaaaggaggattcagaggactctgagcttggggtggagaacaaagaagcagacgggagagaaagaaggaaaatctgggacaagtctcattgggagcagaaactagggagggagtaaagtgtaaaaaatgcctggacatcaggcatctcagaccatttgcccaattttcaacaaaaattatctaggtcttgtaggatagacaaatcaaaagtgcctttctctggccacttggaaaaactgtcaagtttgtattggggccaagtggtattacagaagaaaacaagacgttcaggttttaggtcaggtgttagtcaaaggggtgttaggtttctaagaacacaggctaagggggaagagagaggaatggaatgcagaaggttgcccttagtggagaaggtaagtttaaagaggaaggtagacacatggagaaatggaggtgggcagctaccagtcttccagtaggcatccctgactgagtcctgggctttaatgtgggtgagcagccaaagcaggcatccctgcaattgacctgccatcaagggaatgtgggtgaatgatcaaggaaggcatctccgcagtgatcaaacgccaagggaagactgtcttcccaagtccatgaccaacatcggagtctttggatgcacggataaaatgtgtctgctttttgtctctactaggaagggagagaaactgaaactgaaagaagagagattgaagggaggtgagagaggttaggtagagagcaaaaaaaccgcttatccaagtgcaaaaaaaccgcttaccgatttgaaattagtgagacgatccttgggctggctggtctgatgacccgaggtcataggtggatctcctcatggagggagtgtaatgacaggggatgggtctcctgaggagttctaatgtcccaggtttcagcacaaaatgttacatgcgtctgagtaaagagagcacctagcaggctttgtgcgagcaacaatggctgtgtattacatccggatgtggatgggctgtccaacaaaacagtcagcaaagggtggtgggattatcattagttctcataggtttgggataagcggtggagttaggagcaattttttttgtaggcagtggggtggacgttacaaagtacattctcaagggcggggaggatgttacaaagtacattcacaagggcggggagggtgtatcatcacaagggtggggaggaaggttacaaagtacatttacaaggagaggaaaggtgtactgtcacaagggccaatggcagggtacattcactaggtgggggaggatgtatcttataaagtacattcacaagggcaggggaatatcacaaagtacattatcacaagggcggggggatgtcacaatggcttgaccatggtatggccagctcagagtaccttacagttctgatgtttaaaattacattcttttttttctttaaaaaaaaaaaaaaaaacagggtttcactctgtcacacaggctgaagtatagtggcattatcatggctcactgcagcctttacttcctgggctcaagcagtcctttgcctgagtaccagggactacatacgtgcaccaccacatccagctaatttttaaaaatatattttgtagagaagagatctctctatgttgcctaggctgccctcaaactcctgagctcaagcgatcatccttccttggcctcccacattgttggcattacaactgtgagccactctgcttggccctttattcttttacatatttaattttttaaaaaatcaacaaagatagagggaaaacccaaaatggaatacgaacaggaacaatcaatctgaactttgtatcaaatgggtaataagactatgtaacaggaacaacacaacaacagttgctgcctagacattagaaatagaggccaggcacagtggctcaaccctgtcatcctagcattttgggaggctgatgcagaaggataacttgaacaggatttcaagaccagcctgggcaatatagtgagacacagtctcgaccaaaaaaaaaaaaatttaaaaataaaaaaattagccgggcctggtggtacatgcctgcattcccagctactcagaaggctgaggtgagaggattgcttgagcccaggaggtcgaggctgcagtgagctatgattgcaccactgcactccagcctaggtgacatggcaagacactgtctctggaaaaaaaaaaaaaaaaaaagaacaccaccggccactgtggctcattcctgtaatcccagcactttgggaggttgaatcaggctgaatcaggggggtctcaggagttcaagaccatcctggccaacatggcaaaaccccgcctctactgaaaatacaaaaattagctgggtgtggtggtgcacacctgtaatcccaggtacttgggaggctgaggcaggagaatcacttgaacccaggaattggaggttgcagtgagctgagatcacgccactgcactccagcctgggtgacagagcgagactctgtcattcataaataaataagtttagaaaaaaaaaatgtgtctgaaagggtcttgagcatccctctgggcaaattccaggcatcatccataatgatgaatgcacaaatacaaagatacgaatgagccagagccaaccttatattcctgcagtaaatgccactgggtttactattttcttatcaagcagttggaatttatttgctaatccgttccttcctagcttccttttttccttcttttttttttttttttaaatggagtcttgctctgttgcccaggctggaatgcagtggcatgatcttggctcactgcattttttaatttttaagttttttgtagatggggggcttgctatgctgtccaggcaggtctcgaactcctgagctcaagtaatccttttgcctcctttcaaagtgttgagactccaggcataagccactttgcccagttgctactattatacttagcgcatttttttgtttgtttgttttttgagacagtcttactctgtatcccaggctggagtgcagtggtgtgatctcggttcactgtaacctcctgcctcagcctcccgagtagctaggaatacatgcacatgccaccacgcccagctatatttttttagttttagtagatacaaggtttcaccgttttagccaggatcatctcaatctgaccttgtgatccacctgcctcagcctcccaaagtgctgggattacaggcatgtgagccaccgtacctggcttacttagtgaatttgtaccaatattcattaccaatataattctgtagtttttaatgactgtactgtttttatcagtgataaaaacgatacatatatacatcttgtactgcatcataaaaagatttagcaagatttgcttcattgttaatactctgaaaggatttatggagaattaggaccaattggaccttgaaaatgtcatgtaaagatgtctggctgggcatggtggctcatgcttgtaatcccagcactttgggaggcccagaagagaggattactctagctcaggagtttgaggacagcctgggcaatggagtgagataccttctctaccaaaataaaaaagtgtgagtttaggtgctgtgttccttgttgttgttacagtgtgagccaccgtgcctggccgagactgggtaagttatgaagaaaaagaggtttaatggactcacagttccacatggctggggaggcctcaaaatcatgacagaaggtgaaggaggagcaaaggcacatcttatatggcagaaggcaagagagcctgtccaggggaacagctgcttataaaactgacagacctcatgagatttactcactgtgacaaaaacagcacacgcctattatcccagctacttggctgactgaggcatgagaattacttgaacagcatggggaaacccccccccatgattctattacctcccacctggtctctccctcgacaccatggggattatgggagctacaattcaagatgacatttgggtggggacacagccaaaccatatcagctggcaacttgcttgcagctcataacatcaactgtttctttgggccttcagtcctgctgacttccggcctcctgagtccctaagcagaggaatacgaattcaaatcttgattttctcattgcagctcatagtgggagatgcccagtctctctgtgaacattgacagaattttttttttttttttgagacagagtctcacactgtcaccaggctggagtgccgtggcgcaatatcagctcactgtaacctccacctcccaggttgaagtgattctcccatctcagcccccaagtagctgggactacaggtgagtgccaccacacccagctaatttttgtatttttagtagagatgggggttcaccatgttgcccaaaatggtctcaatctcttggcctcgtgatccaaccatctcagcctcccaaagtgctgggtttaaaggcatgagccactgtgcctggcccagaattctttactgctaacacgagtgggcctggttctggaggatttcccagtgggtcctgaagaaccacagtttattggcttgtgggcaaaggggtatgtgtatcagttggcctttactgtgtaataaacagccacaaaaattactagctgaaaacagcagctacttaattagcagaagcctcttgaggatggacttgcaaaccaaagttgtgctggtttctactggtcaaagcaaggactggctcacataaaaaggagagagattgcaccttcagagagtaatctcaagacatctgtaatctaccacagggtgtcactgggcctctgtcaaggagcctattctttctgccaccagatctgtctaatagcttgtgtgacaatgcacttccttctgggtctctctccaagtgtagtaagtgtatatgggaatcactttattcaaacagtgtagtgcacttagttagaaagaaaaggtattaaggaagacttatatttaaaattgttatttatggtaacaacgaaaagtaacatacaaatttcaaacatcaagaataaaataaattaaaggtatgatcaatacacatcagtacaaagaggggaacacaatgaaacaaacaaaaaaaattagatgctagaaattaatccaaattattactaattaaatgtcaggcactaaatgtgcaacataaaaggattgttaattggtattattcaagtattttttctttttttttttttttttgtgacagagtttcactcttgttgcccaggctgcagtgcaatggcgtgatctcggctcactgcaacctctgcctcccgggttcaaatgattctcctgcctcagcctcccaagtagctggcattacaggcatgcaccactaggcacagctaattttgtatttttagtagagatggggtttctcagtgttggtcaggctggtctcgaactcccgacctcaggtgatcacctgccttggcctcccaaagtgctgtgattacagacatcagccactatgcccagcggtatacagattttttaaaactccagctaaagtatgtataaaaagacacatttttttaaaaagcatacagaaagactaagaagtagaggaaaatcaagctgatgtaactatataaatatctaacagaattagtggaacagaaaacatgcaagaaatagtgtagatttttcaagcgaaatatctgaaagaattcataaacctgggtactctctaccaagattaacacaagcaaagggaaagaatgcacaattaataagttattccagaatgcaaaaggagactgaagttatacaaccagcaaaaatgaaaaatataaaaagtataaatttttgctacacatttggaaataaaaacatgcctagaagaatattctcaaaatacttatgcaagccttagttgtctttttttttttttttttatgagatggagttttgctcttgtcacccaggctggagtgcagtggcaagaactcaactcactgcaaccttcgcctcccagattcaagcaattctcctgcctcagcctcccaagcggctgggattacaggcgcccgccaactcacctggctaattttattttttgaatttttagtagagacaaaagtttcaccgcattggccaggctggtctcgaactcctgacctcaggtgaccccctgccttgacctcccaaagtgctgtgattaaagccgtgaagcaccgtgcccaacctagttgtctttttttttttttttgagacggattctcgctctgtcgtcaggctggagtgcagtggtgtgatctaggctcattgaaacctccacttcaggggttcaagagattctcctgcctcagcctcctgagtagctgggattacaggggcacaataccgtgcccagctaatttttgtatttttagtaaagacggggtttcaacatgttggccaggatggtcttgatctcttgacctcatgatctgcctgcctcagcctcccaaagtggtgggattacaggcatgagccaccactcccagcctgataactgttttatttatttatttttatttttttggagatatggggtctgtgttgcccagactgatcttgaactcctggcctcaaggaatccttctgactgagcttcccagtgtgctgggattaaaagtgtgagccactatgaccagccagaagagataattttaactttttaaaatattttgcagtattggccgggcacagtggcttgtgcctgtaatcccagtactttgggagtatgaggcatgcagatcacctgaggtcaggagtttgagaccagcctggccaacttgatgaaaccgtctctactaaaaatacaaaaatcagccaggcaaggtggaggctgtctgtaatctcagctactcgggaggctgaggcaggagaaccactggaacccaggaggtggaatttgcagtaagttgagatcacaccattgcactccagcctgggcaacgagtgaaacactaactcaaaaacaaagaaacaaacaccaactcaaaaacaaagaaacaaaccaaaaaaatgaaaatatcttgtagtatttttaaatagagatgtggtttcgctatgttgcccaggctggtttgaactccttggctcaagggatctttttgcctcagcctccaaaagtgctgggattacaggcctgagccactattcccaacctagatgactcttatagattaagaatttagaaatagtaggaacatgccccactacagtatatgacagtcattatatacaaatatcattaagggacaattttttaaaaatcacaatgttattcaaacatagctccataacatattagtaaaggtcatgaagtatttttaagtgatccattatgtcacagtcgagcttatccaggaatacaaggttgatgtaacattggaaaagcaataaatacaaataccacatttatttaatttaatttatttatttttgacagagtcgcaccctgtcacccagcatggagtgcagtggtgcaatcttggctcaatgcaacctccacctcccaggttcaagtgattctcctgcttcagcctcccaagtagctgggattacaggtgcacatcaccacacccagctaatttttgtattgttagtagagatggggtttcaccatgttggctgggctggtctcgaactcttgacctcaaatgatctgcccacccccacctcccaaattgctgggattacaggcataagcccccacacccagcctgaccacatttgttttagaaaagcgcctttccatgcattcacttcttcaagttttttttttgttttgtttttgtttttttttttgagatggggtcttgctatgttgcctaagctggtctagaacccctgggctcaggccaccctcccaagtagctaaaactataggcatgcatcaccacatcatttcattgaagtatttattaggtaccatcatgagctaggtgcagttctaggtattgagttttatcagtaaataaacatgatcatcacagaggatgtgaaggaagcatttaataaattcaagaggaattcagcctcataaactatgaaatattgggaaataattcatcatgtaaaaactggatataaagaaaaaacttttcctgcaggacattgttgcaggaagtcagggaccccaaacggggggactggctgaagccatggcagaaaaacatggattgtgaaggtttcatggacatttattagttccccaaattaatacttttataatttcttatgcctgtctttactgcaatctctaaacataaattgtaaagatttcatggacacttatcacttccccagtcaatacccttgtgatttcctatgcctgtctttactttaatctctcaatcctgtcagctgaggaggatgtatattacctcaggaccctgtaataattgcattaactgcacaaattatacagcatgtgtgtttgagcaatatgaaatctgggcaccttgaaaaaagaacaggataacagcaatgtttaggaaacaagagagataaccttaaattctgaccgccggtgagccaggtggaacaaagccacatttctcttctttcacaagcaaatgggagaaatatcactgaattctttttctcagcaaggaacatccttgagaaagagaatgcacacctgggagtgggtctctgaactggcccccctgggtgtagccatctcttatggtcgagactgcaggggtgaaatagaccccagtctcccatagcactcccaggcttattaggaagaggaaattcccacctaataaattttagtcagaccagttgatctcaaaaccgtctcctgataagatgttatcaatgacaatggtgcccaaaacttcattagcaattttaatttcaccttggtcctgtgatctcgccctgcctccacttgccttgtgatattctattaccttgtaaagtacttgatgtctgtgacccacacctatttgcacactccctccccttttgaaaatccctaataaaaacttgctggtttttgcggcttgtggggcatcacggaacctaccgacatgtgatgtctgccccggacacccagctttaaaatttctctcttttgtactctgtccctttatttctcaagttggctgacacttagggaaaatagaaaagaacctatgtgaatatcggggctggttccctgacaggacataacctcttcaaaaaataaaaaagaaataaaagcctacagccaaaccaacaaaatagagtgcatatctcaccagaactgcaaagacaagtatgctggtattactacttttagttggtgttgtgcagcgggttaaaatcagtccagtaaagcaagaaaatatttagagagagcttcatcatcatacgaattttgggggtcattgttcagtccaaagtacttaatatgattcttttctctttccacatagagaatcagataatctataaataatgactcttactgttccactttaggagttaggtatacatacatatgtgtatatatatgtatatatatatacacatacacacacacacacacacacacacagtgaccccccaaatttcatatgaagttccaaacctcaatgtgactgtatgtgaaaagagaagggggcggggaggggggagaccgaccgacctatttgttggtctccatcgtgtgaaaacatgaggaagtgggcacttacatgccaggaagagagctctcactagaggttgaccatgctggcactctgatctcagacttccagcctccagatatgtgagaatataaatttgtgttttgggccagatacggtggctcaggcctgtaatcccagcactttgggaggccaaggcaggtggatcaccaaaggtcagatctgaccaacatggagatcagcctaaccaacatggagaaaccctgtctctactaaaaatacaaacttagctaaggtttgtggtgcatgccaataatcccagctactgagggtgaggcaggagaatcactggaactcaggaggtggaggttgcggtgagccaagatcataccattgcactccagcctgggcaacaagagcaaaactccatctcaaaaaaaaaaaaaaaaaaaaaaaaaaaatcctgtgtttttaacctcattgatttaaaattaaattaatttctaagccatttggtctgcggtattctcttatggttgtctgagctgactaaggcagatattggtactgagaagtgaggtactgcaattaaaaacaaacaaaaaaactaaaaatgtgaagcagctttgaaactgacaaatgagtagaggctggaaaaattctgatgtgcaagctggaaataaggttggtaagggttattctggtgaggtgtcattggggaatgaggaacatgctattgggaaatgaagaaaagacaacccttgatataaagtggtgaagaacttggcagaactgtattctagcattttacggaaggtagagcttgagacagataaaatggtatgtatcactaagatctgtaattaaagtgttaaaggacacaggaagcttcattattcctgagtgcttacaggaaaatgtgctgggaacaggccccccaaatctggccataaacaggcaatgagaaactggccataaacaaaatctctgcagcactgtgacatgctcgtgatggctatgacgcccatgctggaggctgctggtttaccagaatgagggcaagcaacacctggcccacccagggcagaaaactggaaaactgctcaaggcattcctaaaccacaaacaatagcatgagtgatttgtgccttaaggacatattcctgttgcagataacaagccagagcctgtccctttctttctcataaggaatacttatagctgatctacaatctataggaataatgtttatcacaggcttactgtcaataaatatgtgggtcaaactctgttcaagctcagctctgaaggctgtgagccccgattcccactctgcactatatttctgtgtctttgtcttaattcctctagagccactgggttagggtctccacgacccagctggtctcggcaaaaatgcaaaaggagacctgaattgcagaagaaattgttaaggaaaaaggaaccagaacttggagatttggaaaattctcagcctatccatactgcaaaaattagaaaacttgtactgaagagaatcctcaaagtgtggctgaacaatcatttgataaagagatcatgagtgggattcatggactatatcagccatcttaacagaagtgagaagagagactggattatactataagagacactgccacttacattgtgccacctaaaatggacagagaagacagaacagaacagtcaaggttgtcacacttcttattttacaagaaggggacatagaaataatcagctgtgaaagggcactggcagttatggatggtttcactcctgacatgctctgcaggatccatgggaacagaagagaaccttggaggagcatctttttaacaatccacctctggggcctacatcatcttggcttctggtaaattttgacatgaatgtgccacactggcagccactaaccaacaggggctgggatcaatctgcatgatttatctcgtacagaacttgttaatgctatgatcttaggaatctaatcaccaaggtgaggcagcctgcagtactgacctcaccatccatgacccttcttcacagatgcccagactcaggtaaccatgatgttgtattcagaacctgtaggtttaatttcagaccctcgggatgcatctaaggccaatctgtgagccattacaacctccaaaaggcatttaggactaatctgatgatctttgcactgccaataattaaagatggcaaccaatgggctaaatggtaacaacactcatatccttacattcatagtatttctccccagtgtgaattctttcatgcatacttaggcatgaggaaagagcaaatgctttcccaaattctttacatacaaaaggtttctctctggtaggagttcacaggtggggtgaggaatacagaaattctttcccacatatcttgcatttacctttctccactgtgagttttcaaatgtttactacgatgggaagaagtaatgaaggtcttcccacattcaacacattcataaggcttctctcctgtgtgaattcttctatgttgagtaagcgttgaagatctattgaaggctttcccacattccttacactgatagggtttctctccagtgtgatttcgtatgtgtatagcaaggcccgtgtactgagtgaaggcttggccacattccttacattcatagggttttattccagtgtgagttcttacatgttgagtaaggtgagttgatctagtgaaggctttcccacattccgtacatttgtgtggttttattccagtgtgaatttgaatgtgaacattaaaggatgaggaatttctaaaggatcttccacattctttacattcaaaggacttctctcctttatgagtttttgcatgtgcagaaagttgagaaaaattagtgaaggatttcccacagttcttagtcttttcggatttctttccagtatgaactgctacacactgctttaagtgtgaggaagttgtgatggctctctcacattcctgaaattcacagagtttctctccaatgtggattcccatgtgattatcaaggcttgcaaaatacttaaagccttttccacattccttacatttgtagggttgtcttccattgagaatttcaagatgcacagcaaggcctggagttaaggtgaagacttttccacatggattaaatttggaaagttcttgtccaatagaggcttccttgtgcacactgatgctgtcttttccataacaattaccctcaaaagtgttccctccattctgagctctcatgtgtgtcttaaggcaaaactgttcactgaagacctctccacaattctcacagagtttccatccactgtagcttcttgtctgctgatgaggggataaaggatttaaaatgttttcagacatattaagagatttcacccatctgaacacagaaacattattttgatgacaattattttactttttaatgtttaattttttttttttttttgagacagagtcttgttctatctcccagtctacagtgcagtggcacaatctctgctaactgcaaccttcacctcccaggctcaagtgattctcctgcctcagcctcccgagtagctggaaatacaggtgtgcactactgcactggggagtttttctactttttttgtagacatgggttttgccaagttgcccaggctggtctcaaactcctgagttcaggtgaactgcctgtcttggcctcccaaagtggtaagattacaggcgtgacccaccatgcacaacatgttttacttttttcagagctggggttttgctccattgcctggtctatagtgcactgcagtgatcatggctcactgtaacctcaaacgcctggctgggttcaagtgatcaccctagctaaaagctgtgtagctaggactagaggcatgcatcatccaattttttgatttatttatttattttattttatttatttttgagatggagtctcactttggctggagtgcagtgtcacgatttcggctcactgcaacctccgcctcctgggttcaagcggttcttctgcctcagcctgccaactagcatgtgcaaccagacccagctaatttttgtatttttcctacagatgggacttcatcatgttagccagggtgttctcaaactcttgaccttctcatccgcctgcctaggcctccgaaagtgctggaattacaggcatgaggcactgcgcccggcctcaatttatttttatagagacagggtcttggtatgtagcctaggctggtctcaaactctacaagaaacccccgtctcagcctcccaaactgctgggattacagccatgagctaccaagtcagcctactttgataaccataatttttacaatatttcttccatggtttcatttcctaccctcttgatctcttgccagaattctatgccactggctctaattgttcaaaaaaaaactgtctttttttgattgttgggggtggtttgagacagggtctcactctgtcacccaggctgggtaccatggcacaatcacagctcactgcagccttaaactcccaggctcaagccatcatcctgcctcagtctcctgaggagcctggattacaggtgcatgccaacgtgcccggctaattttttatttttttgtagagacagagtctccctgttgcccaggctggtcttgatctcctagactcaagcaattctcctgcctcagcttcccaaagtgctgggattgcaggtgtcagccattgcacccagccaaattgtgcagattttcatgaaactttaaatcctcaatgtctagttacatatgtgggaatatgtacttgtcggtatttttcagtgacaagttatacaggtatggaacatcagaaaattcatcacattcagactatctctccagagaccctgctccctcaagggtgcaggctacttctctctcaagtatctctcatttgtgctgtttctttttcatgccaactccacctcccgtgtttaagcaattctgcctcagcctcccatgtaactgggattacaggtgcccaccacacctggctaattttgtatttttagtagagacagagtttcaccatgttggtcaggctggtctcaaagtgctaacctcaagtgatccacacacctccacatcccaaagtgctgggattacaggattcactttcttttctttctttttttttttttttttttttttttttttttttttagatggagtctcacttggtcatctaagctggaatgcagtggtgcagtgctggctcactcagcaacctcggcctctgggtaagcaattgtcctgcctcagccgcccgagtaactaggataacgggtgcccaccaccacacacagctaattttgtatttttagtagagacagagttttcaccatgttggccaggcctgtctcaaactcctgacctcaagtgatccacctatctttgcctcctaaagtgttgggattacaggcatgagccaccacatccagcctctttttaaaatcagagatggtatattgctatactgcctaggctggtcttgaactcctgggctcaaatgatgatcccacctcagcctcctaagtagctgggattacagatgtaaaccacaccactaactgggctgattttttagaatggaattctcaatcttttctgagagaggaaattaagaaatatccctcatggcctgacacagtggctcacgcctgtaatcccagcactttgggaggtcgaggcagatggatcacgaggtcaggagatcaagaccatcctggctaacatagtgaaaccctgtctctactataaatacaataaattagctgggcatggtggtgggtgcctgtagtcctagctactcgggaggctgaggcaagagaatcgcttgaacctgggagttggaggttgcggtgagctgagatggtgccactgcacttcagcctggcagagcaagactccgtctcaaaaaacagaagaaaaaaataagtatccctcatgaatcttaccatttgtatcccagtgaatatttgattcttcaaaaaaccctgctgaagtgatgaccgtttggttctaggttgtatttcccattctgaagttaagcagaaaaagaaatctaagggtttagagaagaaatgtgttagtttaaaattagtcatttgtccttgttttcaaattaaacacagtatgaaaataaaagccacaggccaggcacggtgactcaggcccgtaatcccaggactttgggaggctgaggtgggtggatcacgaggtcaggagatcaagaccatcctgaccaaaatggtgaaaccctctctctagtaaaatacaaaaatatatatatatatatatattagccgggcgcgttggcatgtgcctgtagtcccagctactcaggaggctgaggcaggggaatcacttgaaccccagaggcggtggttgcagtgagctgaaatcacaccactgcactccagcctgggtgacagaacgagactccatctcaaaaaaaaaaaagaaaaaagaaaacaagagaaccttgaggattttggtatgtcaaaaatttggctataaggatgtggggtttattacacaactgatgtgtttagatagtttataacaaactgcttctgtgaaaattacaactgatggggaacaggaagagaaaattatcaggaaaggaaagcaggaaagatcaggataaagagcatatatcaaaatgataaacttaacaaaaaaacagaacagcttcgggaagctgaggcaggagaatggcaagaacccgggaggcagagcttgcagtgagcagagatcctgccactgcaccccagcctgggtgacagagtgagactccctcaaaaaaaaaaaaaccaaaaaaaaccaaaagcaaaacaaacaaacaaaaaaaacagaactggtagttttgtttgactagatggaaagtaaaagtcagagatatctgaaattctgagaaaaacagcttaaatcttctcaggcaaagtggatctttaaaaatcttttttttttttttgagtcaaagtcccactctgtcaccaggctggagtgcagtggcacaatctcggctcactgcaacccctgcctcctgggttcaagcgattctactgcctcagcctcccgagtaactgggactacaggcatgtgccaccatgcctggctaatttttttgcatttttagtagagacagggtttcaccatgttagccaggctggtcttgatttcctgaccttgtgatctgcctgcctcagccttccaaagtgctgggattacaggcgtgaacctccgggaccggcctagtctttattcttaggatttttttttagagatgaggtttcacaatgttgcccatgctagtatcaaactcccaggctccagcgattctcccacctcagcctcccaagtatctgggactacaggtgcaggccaccatgccaagcaaagtgatgttactcttacccacagaggccaggttcatgtagttctccagcatcacatctctgtagaggtatttctgagttgtgtccagtaaagcccactcctctggggtgaactccacagccacatcatcaaacgtcactgaatcctaagtcatcaaacacatgctggtttgagccaatgaacacttccaccaatattcactggagaatgaggaaaggggaaccttatactcacttatacgtggttctcaagtctcccatgatctactccagggtttaatgtctcaggagctcttgtgtctaaacaatcaaggttgacctcctacaggcatatgccttaaacagcactttttttctttctttctttctttttttttgtgacagagttttgctctttttgcccaggctggagtgcaatggcacgatctcggctcactgcaacctccacctcctaagttcaagtgattctcatgcctcagcctcccaagtagatgggattacaggcatgcaacatcacgcctggataatttttgtatttttagtagaaaaggggtttcaccatgttggccaggaaggtctcaaacttctgacctcatgtgatcggcccacctcagcctcccaaggtgctgggattataggtgtgagacaccatgcccatctgaacagtactttttaaaaaaatttttaaatcttttttgtctgatctatttatttttaattttttaattttttttaattttaatttttgattagaacagtacttcctaaacattaatttttatctatctagcatctatctatctatctatccaatctttttatttatttatatataaagacagggtcccactgtgccacccaggcacaatcgctgcttactgcagcttcaatctcctgggctgaagtgctcctcccaccccagcctcctgagtagctggaattacaggcatgagccactgcacactgcttacattatctcagcacaaacaggctaggagctcttcctgtcccattggtctctgggcagcacactcctcagcacactgcagatacctgataaatgctgatgagtgaattaattatttgataaaaggacactttcatctgctttatcatctgtcaccgcacccagcaatgtaagaaagatgcagttggcaccatgaaggtcaagcttaagtagtaattaccgagctactggaatgatcttcaagttaacactttatgtataggagacttcattccctggggaaattcacctggggattcagtccttgagtaaggcttcatttgctctaagaaaactctggagatgagtctgtctagaaggaaatgtgtctacctattggatgtaagtatgtcattttgtacaacggtacattttctgtttacctggtaagaatttgaccggtggtcctctaccatcgttcctatctttgtcttttcttcaaaaggacagattggttccctgggaaaaaaccctagtggaaaagtaagaaggcatgagaagccagagctgcccacattcttatgcccagaagtcattccatcctagcttgaaattcccatatgctcctgcacactcgaaaaaactacacacacacaacacttccatgaaatgccgtagtagtcctgtatcacctagacccagaaaagcagatatgggctgagctgcctgttgtgtaaagggtaacagtttcatttttcaaggaaacttacaccctgaaaaatgtgactatctgcccatagtagtaacactcatgaagcttatgtagcatttccaaaggcacacaaaccagggctgaattctaaaacagcattctgactgggcacagaggctcatgcctgtaatcccaacattttgggaggccaaggtgggcaaatcactcgaggtcaggcattcaagaccagcctggccaacatggcaaaaccccgtctctactaaaaaaaaaaaaaaaaaaaaaaaaaaaaaaaaaaaaaaaaaaaaaaaaactacaggaggctgaggcagagaactgcttgaacctgggaagtggaggttgcaatgagtcaagatcatgcaactgcacttcagcctgggtgacagagtgagactccatctcaaaaaaaaaaaaaaaaaaaaaaaaattagctgaacctggtgatgcatgcttgtgatcccagctacttaagaagctaaggcaagagaattgcttgaacccagcaggcggaggtttcagtgagccaaggttacaccactgcactccagcctgggtgacagagcaagattcggtctcaaaaaataaataaataaaaatatgaataaaataaaagagcattctgcgtcttacttgaattcctccttaaagaactagcagcagccaggcacggtggctcatgcctgtaattccaacactttgggaggccgaggcaggcaaatcacctgaggtcgggagttcaagaccggcctgaccaacatggagaaacccgtctccactaaaaatacaaaattagcctgtggtcccagtgactcgggtgggtgaggcaggagaattgtttgaacccaggaggtggaggttgcggtgagctaagatcatgccattgcacttcagcctgggcaacaagagcaaaactccatctaaaagaaaaaaaaaaaaagcagcatgcctgttcaggcccagctcactggactcttatgttgtggagggcgacctaaagcagaatctctgaaaaagagcatcaacaaggacttaccatgggacatatcaaaggctgacatcctctgaagctgatggtgagatgtgcctcaatgctgtctttcttgatgccaagatcgcctcagggcagcttatgaatctaggtggatacaggcaatctccattcccctttgtacagggttatctgaggccctgttcataccaatcaccaaacaacaagcatcaaacatcagtcattgaacattatgcatgagctttctctctgcaggtgacagatgtgaaggccaccaaaaactgtatactcagtatcgtcactcagtaatgatagtattaataacagcaactgacatttattgaggactagtatgtcagaagtagctctagtagctttatatatacatgctcacttaattatcataaccatccttcccaacagctatcattacctatatgtatctatgtatctatccatctatctatttattgagacagggtctcattctgttgcccaggtttaagtacaatgacacaacaacagctctctgtagcctacatttcccgggctcaagtgatcctcccacctcagcttcctgaatagctgggaccacaggtgtgcatcgtcaagccttattattatattattattattattttgagacagagtctcactctgttgcccaggctgaaatgcagtggcgtgatcttgactcactgcaacctctgcctcccaggttcaagtgattatcaggcctcagcctcccgagtagctgggattacaggtatgcaccaccatgcctggctaatttttatatttttagtaaggatggggttggtcaggcacggtggctcatgcctgtaatcccaacactttgggaggccaaggcaggtggatcacgaggtcaggagttccagaccagcctggccaacatagtgaaaccctgtctctactaaaaatagaaaaaattagctgggtgtggtggtgggcacctggaatcccagctactcaggatgctgaggaaggagaatcgcttgaccccgggaggtggaggttgcagtgagctgagactgtgccatcgcactccagcccaggtgacagtgcgagactccatctcaaacaacaacaacaaaaaagaaatgtgtaaggaaggggtttcatcatattggccaggctggtctcaaacaagtgattctcccacttcagcccccaaagtggctgggactacaggtgcacaccactggatctaattttttgcatttttagtagaaacaaggtttcaccaggttgcccaggctggtctcaaactcctgggctcaaacaatcctcccaccttggcctcccaaagtgctgggataataagcatgagccaccatgcctggcctattacctctattaatactgaaaaaaacctacattcaaataatcctagtaattggtctgatatttgaccctagagcctgatcccctgtatatgctgttaccccccagtatgaccagaagacagcccagacttgcacagaacaactcagtagtcactagccacgtgtgttattgataacttcattgtgtacctaagatgatgaaaaacagaatttaaaatattcaaaagatggccaggcgcggtggctcacacttgtaatctcagtactttgggaggctgaggcaggcagatcacctgaggtcaggagttcaagaccagcctggccatcatggcaaaaccctgtctctactaaaaatacaaaaattagctgggcgtggtggcacacgactactcagaaggctgaggcaggagaattgcttgatcccgggaggcagaggttgcagtgagccgagatcatgccactgcactccagactgggtgacagagcgagactccatctcaaaaaaaaaaaaagagagaaagaaaatatagacaacaggccaggcacagtggctcacgcctgtaatcccagcactttgggagtaccaaggtaggcagaccacaaggtcaggagatcgagaccatcctggctaacacaatgaaaccccgtctctactaaaatacaaaaaattagccagttgtggtgttgggcggctgtagtcccagctacttgggaggctgaggcaggacaatggcgtgaacttgaggtcaggagttcaagatcagcctagcccatatggtgaaacctcatctctactaaaaatacaaaccttagccactcatggatgctgtagtccaacctactcaggaggctaaggcaggagaatcactcgaacccgggaggtgcccacctcagcctcccaaggtgctgggattacagatgtgagccactgcgcctggccagctattgttctaaatgttgttctttactgaaaagaatgaacacaacagttgccacttggtacacaactaatgtagataatggccttatctctatgccaatttgaaaaaacagccagaactggatgggtgcagtggctcacacctgtaatcccagcactttgggaggccgaggcgggtgggtcacgaggtcaggagatcgagaccatccggctaatgcagtgaaacctcgtctctactaaaaatacaaaaaaaaaaaaaattgccaggcatggtggcaggcgcctgtagtcccagatactcaggaggctgaggcaggagaatggcatgaacccaggaggtggagcttgcagtaagtgagattgcgccactgcactccagcctgggtgacagagcgagactccatctcaaaaaaaaaaaaaaaaggaaaaagaaaagaaacagccagaatcactccacaccattgcctccagactgcataaattttccttcctgttcacttccaaaatatagtcttcaagggtcctgacattccaaaaatcatcacactggttgactgtgtagatgggtttttttttgttttgtttttgttttttgagacggagtcttgctcttatcgcccaggctagactgcagtagcacgattgccaccactgtagctattgttcttttttttctttttctttttttttctgagacagagtctcattctgtcgcccaggctggagtgcagtggcgcgatctcggctcactgcagccgccgcctcccaggttcaagcgattttcctgcctcagcctctcaagtagctgggactacaggactccagagtagctgggactccctagttcaagtgattctcctgccacagcctcccaaatagctgggattacaggtgcatgccaccattcccagctattttttttttgtatttttagtagagatggggtttcacaatgacagccaggctggtcttgaactcctgacctcaggtgatctgcctgccttggcctcccaaagtgctgagattacaggtgtgagccaccacacctggtctgtgaatttgttttgttttgttttgttttttaagacagagtttcactcttgttgtccagccaggagtgcaatggcacaatctaggctcactgcaacctccgcctctttggtttaagctattctcctgcctcagcctcccaagtagctgcgattacaggcatacatcaccacacctggctaatttttgtgtttttagtagagactgtgtttctccacgttggtctggatggtctggaactcctgaccacgagtggtccacccgccccagcctccaaaagtgctggaattatagttcacttgttttaacgttccttaaagtttaattttccccaaggaggggctgcacattttgggttggatttgttatcagtacttacaaaaactattatgttatggttaagttgttccaccactggccagtggactgtcttcaagatggctcctttccttttgacaagaccctaacagtcactgattgttttcacacagggcatgtgttccaacattatcttgtacatttcttgcacggtttggcttatggatgtaatcatatatgtgatctgaggacttttgggtttctgccgtttttgaaaagtttctcagggctggatgcagtagctcacacctataatcccagcactttgggaggctgatgcaggtggatcacctgagggcagaagttcgagaccagctgggcatggtggctcatgcctgtaatcccagcactctgggaggccaaggcgggtggatcatgaggtacagcctgggcgacagagtgagactctgtctcaaaaagaaaagaaaagaaaagaaaatatctcaaataccaccgtttatataacacatttctatatatgcacacatgtgctttaaaaaacagctctaggccaggtgtagtggctcatgcctgtaatgccagcactttgggaggccaaggcaggtggctcacctgaggtcaggagtttgagaccagcctggccaacatggtgaaaccctgtctctactgaaaatacaaacattagctgggcatggtggcacacgcctgaagtcccagctactcaggatactgaggttggagaattgcttgaacctgggaggcggaggttgcagtgagccaagatcgtgccactgcactccagcctggggacagagcaagactctgtctaaaaaaaaaaaaaaaaagcagtttctgtggctacaacgaagtgaaaaaaactccaaggagatggtaagagaatcaaatttccatatccacaacacccttctccttaatccagcaccaagaatgtggaaaatttctaccaattcagtttctacactggaaaaaactgagctcaaggtggacaaccaccttctccaccatcctgggttccctggtaaaagatcagtccctccctgtctcaacccacaggaagcatcacaagagcctgaagggagaaataccctgaggacatccagggacaaagaggggaggcaggactaccatccccagccctgggagcagcatactgtaggggtatgctacacaggtcccctgggcagaacacacagccagccttcccacattgctggaatatgccctttaggactccccaattctggatgggcagtattcttgactgtttgctagagcagaggcaaacatgggtttaagattccatctagtgctgaaaaggaggcggtgacctagggaaattttaaagaaaggaaatcattttgggaggccgacacaggtggatggcttgagctcaggagttcaagacctgcctgggaaacatgatgaaaacccatctctactaaaaagtacaaaaagtagccaggtgtgatggcgtgcacctcacctacttaggagactgaggtgggaggattgcttcagcatgggaggtagaggatgcagtaagccataatcacaccactgcactccaggctaggtgacagagagagacctagtctttaaaaaaaaaaaaaaaaatcaaaagaatttaagaggctggttgctatggctcatgcctgtaatcccaacactttgggaggccgaggtgggtggatcttctgaggtcaggagttcaagaccagcctgaccaacatagagaaacactgtctctactaaaaatacaaaattagctagacatggtggtgcatgcctgtaatcccactactcgggaggctgaagcaggagaatcgcttgaatccgggaagcagaggttgtggtgagccgagatcgcactattgcactccagcctgggcaacaagaacaaacctccgtctcaaaaaaaaaaaaaaaaaaattacacaatggaactttgttttggttttggtatgttgacaaaccaaaatctatgggataaaagcagtactaagggagaattttacagcagtaaacacatacatcaaaaaagtagaaaaatttaaaataaacctaatgataccccttaaaatactagaaaagcaaaaacaaaccagattcaaaattagtagaacaaaagaataaagaccagagccaaaataaaattgaaaataaaaaacaatacagaagatcaataaaacataaagttgattacttgaaaagataaacaaaattaaccttcggctagactaagggaaaaaaatgacccaaataaaataaaaaatgaaaaagaaaacagaacagaaaccacagaaatacaaccaatcattagaaactattatgaaaaactatatcccaacaaactgaaaagcctggaagaaatagacaaattcttgggtgcatacaacctaccaagactgaaccatgaagaaatagaaaacctcaacacaacaataacaagatcaaagtgataacaaaatgaatcccatcaaagaaaagcccaggacctgataacttcactgctgaatcctaccaaaaacttaaagaactaataccaatactacttgaactcctcaaacaaaattgaagaggagagaatatttccaaacttagtctacaaggtgagcattattctcatatcaaaaaccagacaagagcacaacaacaacaacaaaactacacgccaatatcactgatgaacatacctgcaaaaattctcaccaaaatattagcaaaccaaattcaacacattaagaaaatcattcatcacaatcaagtgaaattcatcgtagaaatacaaggatggttcaacatatgcaaatcaataaatgtgacgtaccaaattaacagaaccaagaataaaaaccgtatgagatttccacagatgctgaaacaccatttgataaaattcaatatccctttttgacaaaagtccccaacaaactgtgtatagaacgaatatacctcaaaataataaaggccatatatgacacacccacgtccaacatcatactgaacagggaaaaattgaaagtctttcctctgagatcttgaacagaacaaggatgtccacttttaccacttctattcaacataatactataagttctggccagagcaattaggcaagagaaacaaataaagggcatctcaactaaaaaagaagtcaaattagccatgtttgccaatgacatgacctttttctccttagaaacagggtctccctctgttgctcaggctagaatgcagtggtgatcatagctcactgcagccttggtctcctgggctcaagtgatactcctgcctcagcctcccgagtagctagaaccacaggcatgtgtgacaatgctaactttttttttttttagagactgggggcagaggggtcctcaatatattacccaggctgaccttgaactcctgatttcaagtgatcctcttgctttggcctcctaaagtgctgggattacaggcatgagccaccatgctcagctgacataatcatatttagaaaaacctaaagactctaccaaaaacctgttagaactgataaatgaattcagtaaatgttcaggacacaaaatcaacatacaaaaatcagttgcatttatatacgccaacggtgaacaatctgaaaaagaaatcaaggaagtaatcacatttacaatagctgcaaagactataaaatgccagcaccaggcatgatgactcacaattgtaatcccagaattttgggaggctgaggtggaaggattgcttaagcccaacagttcaagaccagcctgggcaacatggcacggctcagtctcaattaaaaaaaagaaattagccaggcatgatggcacacacctgtagtcccagctactcaaaagagactgaggcaggaggattccttgagcccaggagttcaaggctgctgcatgagctacaactgcaccactgtactccagcctgggcaacaaagtgagaccccacctctgaaaaaaagagaaaataaaaagtaaccaaaaatgtgaaggagctatacaaggaaaactataaaacactgatgaaacaaactgtagagaatacagaaaaaaaatggaaagacattccatgctcatggattagaagaatattgttaaaatgacaatactacccaaagcaatttacaattaagagcaaccgttatcaaaatagcaatgacattcatcgcaaaaatagaaaaaaaatcctaaaatttatatgcaacaataaaagacttcaaacagccaaagaaatactgaacaaaaagaacaaagctggaatcatcacactgccttacttcaaaatatactacaaagctatcataaccaaatcagcatggtactgacataaaaaaaacaaacaaacacatagatcaatggaagagaacaaagaacctaaatacaaatctacacatgtacagacagctcattttcaacaaaggcaccaaaagcatacaatgggaaaataacagtcttttcaataaatgctgctgggaaaactggataaccatatgcagaataaaactagatgccatctctcagcataaaaaaaaaaagtcaaaacagattaaagacttacatctaacacctgaaactataaaactagtagaggaagacccttgggaaacaatccagggcattggtctgggtaaagatttcttgggaagatctcaaaagcacaggcaacaagagcaaaaacaaacatatgagattacatcaagctaaaaagcttctccacagcaaaagaaacaatcaacaaagtgaagaaacaatctacagtatgggagaaaatatttacaaactatccacctgggattaataatcagaatatataaggaactcaaacttgataacaaaaaaaatccgataaaaaaatcagcaaaaggtcagaatagatgtttctcaaaaaaaagacatacaaatggccaacaggcatacaaaaaaatgctcaacatcactaatcatcagagaaatacaaatcacacataaccacaatgagatatcatctcacctcatttagagtggcttttataaaaaagacagggaataacaaatgctgatgaggatatggtgaaaagataatccttgtatgcagttggtgggaatataaattagtacagccactgtagagaacaatattcaggtgtggtggctcaggcctttaatcccaaaacttgaggctgcggtgggagatcacttgagcccaggagttccagaccaggctaggcaacacagcaacacctgtctgtacacacatgcacgcacaaaacctgtctgaaactggcaagacctgtctgcatgcacgcgcgcgagcgcgcgcgcgcgcgcgcacacacacacacacacacacacacacacacacacacacacaaccagtcagggacagtagctcatgcctgtaatcccagctctttaggaggccaaggcaggcagatcatttgaggtcaggagtttgagaccagcctggtcaacatggtgaaactctgtctctactgaaaatacaaaaattagctgggcatggtggcgtgcacctgtagtcccagctactccagaggctgaggtaagagaattgcttgaacccaggaggcggacgttgcagtgaaccaagatcgtgccactgcaccccagcctgagtgacagagtgagactctgtctcaaaaaatcaaagaaacaaacaaaaaaacttagccaggtgtattagtggaggcctgtagtcctggctactcaggaagctgaggtgggaggatcacctgagcccaggaagtcaaggctgcagtgagccatgattatgccatggcactctagcctgggtgacacagcaagactatctcaaaaaaaacaaaacaaaacaaaaaaaacagtatgggggtttctcaaaaaattaaaaatagaactaccatatgatctggaatcccattgggtatatatccaaaagaaaggaaatcaatatatttgaaaagatatatatacattcccttgtttaccgcagcactactcataatagccaaaatatggaatcaacctaagtgtctaacaatgaaagaatgaataaagaaaatatggtatatatagacagcagattattattcagccataaagagaatggaattctgtcatttgcagcaactggatagaactggaggtcatcatggaagtgaaataagccaagcacagcagacaaataccccatattctcacatgtgggagctaaaaagtggatctcatgagcatagagtacagattgatggttactagaggccagaagggtaggaaggagacggagataaagagaggttgattaggctgagtgaggtggctcatgcctgtaatcccagcactttaggaggccaaggcgggcagatcaccctgattatgtgagatcaggagttcgagaccaacctgtccaatatggtaaaaccccgtctctactaaaactacaaaaattagccgggtgtggtggtgcaccccttaatcctagctactcgggaggctgaggcaggagaatcacttgaatccgggaggaggcagaggttgcagtgagccaagatcatgccactgcattctagcctgggtgacggtgagactccatctcccaaaaaaaaaaaaaaaagaggttgattcatcggtaaaatatacagttagaagaaataagaactggtattcaatagatcagtagggtgactacacttaatacgcatctatcatacatttcaacacagctaagagaataacgatgttcctacaatatagaaaagataaatatttaaggtgacaggtatgctacttaccctgattatgtgaatgtatcaaattatcacatgtactctgaaaatatgttcatctattatgaatcaaaaaaatttttctggattgtaaaatagggagtgggagattctggggccaccatgtctgtgggtaaagatattcccttgtctggatcatgtaaagacatccctccaagatgtcactccaagttactgcacctaataccacctaccattaacaaggagcaatgagccatgattatgccattgctctccagcctgggtgatccagcaagactttgtctcaaaaaaagaaaaaaaacccagcatggaggtttctcaaaaactaccatccatagacctcttgaattttggaggcaacacatacatttgcatgtactttaacgccccacacagttacctgtaaggattctagtttcaactgtagacaagagcaatttcaggctgcaatgcaagcttcctaagcacttggtccacctgatccagcagacccagtgatactcaacgtgtccatgttaaatggcatgttatttattggaagcctccggcatgcaccaacagaagatgtagagtacagccctctggtattgcagagtcaatccatgccctcttgtgcagattaactgtttttctcttgagaaacaggttgtggtttgccactagcacatgacagagaatgaacaactagtcatgggacatgaagtaactaaggctgaactgagtaatttgagactttctggtccccaaagcatgaagtacatactgtcacccattatcaaacaactgttgtcagcctctcctctggacccaattccaagtttgtaggaaatcgcatgaaataaaggaatatttacacacaccatgagaatccaatcagaaatatctgattgtatgactttctaagagaatgagtgtgactctctgaaagtcaatataatggacagtaataactgttataggcaaaaagacactgaagacactgacaattgcaatgcaaaaatcttgaatggatcttagatccaaaaacacccaagagcatacgttgaatcaatgaggagaattttagttattacggaaagtagacattagatgacattattatttttaatttaagtgaaatactagtattgtggttttagtatgacaatgcctatttttaggaggtgcattacaaagtatttaaaggtcaagcatcacatgtacaatttatgctcaatttacactcaaattgttcactgtaagatttacatgaggagaaagaaataaaatgctaaaaaattaagtaaatctactagactgggtgtgttagatgttcaagttttccttaggatcaaatttttcagaaaaaaatgtaaaaactacacttagtccaaacatgctcttaataaattatacagatactagatattttattacactgatactagaatactattctgattataatagtaaataattctagtgtcagtgtaataaagcctccattctttcttcctggttcctggaggcctctgttttgaagcactgtggggaagtacagacctaagaacttcagatgaagagaatagttgagtattattgcctttcttttttttttttttttttttttagacagtttcgctcttgtcacccaggctggagggcagtggcgggatctcggctcaatgcaacctccgcctcccgggttaaagtgattctcttgcctcagcctccggagtagctgtgtaagatacaatatatttctctgaatttctcttcaaaagttcagcctgtaaacttccttgttctttgttctcaaactcaactttcctgttctccatgcctccttgcctctagttactgtaaacaaccttcccatcagctctaatcaataactcacatctgttcccttggctactcattctgcagctattccactctttgaaactgcacatcccaccatcatgactcacacatccccctacccttccttatttggggaaaatattcacagatagccaatagggtcagtttagattctgcggtctgaccctaacccacgggggagagacacagaagtagggacccagcgttagaaataaaaaccccttcccctcccttatctggtgtactctcgccatcactccatccacgagactcacccttctatagaaataaattgcgttgctgagaaaacttttgcctgagtgctggtttcactttgcagcacccagcgttttatttttttatctccaacagctgggattacaggggcccaccaccaagcccggctaatttttgtatttttagtagagacagggttttaccatgttggctaggctagtctggatctcctgacctcaggtgatccgcctgcctctgcctcccaaagtgctgtgattacaggtgtgagccagtgcatctggcctggctttaagtagaaaggcttgcagctggtaacaattagaaaaaaaataacctgcaagaaaataaaaattaaaaactaaaggcttagtctacacgcgttcatatttacatacaaaaacgggcacaccctaaacaactatgttttttccatctgaatgtaatgtgtcaaaaataagtggcgggtggatcacttgaggtcaggagttcgagaccagcctggccaacatggtgaaaccccatctctaccaaaaatataaaaaattagccaggtgtggtggtgcacgcctggaatcccagctactcgggaggctgaggcaggtgaatcatgttataaagttttcatgccacaaaaaaaaagcactcaaatataacattttcttttctcagcaaggcaatttacttctacagaagggtgtgccctcacagatggagcaatggtgagcacacaccaggacaagggaggggaaggggttcttattcttgaggaaagtggcccctgccgctttgtccttccccgatggctagggttagaccccacaggctaaactaattccaattggctaatttaaagagagtgacagggtgagtggtttgttggggaaaatggttataacagagcaggaaattggaatgagtcagggtggaaaatgagtcagggtggagtaagtaatcgaaataagtctgggtggagcaggtaatcagaatgagtcagggtggagcaggtgatcgaaaaaggttgctttacggagaagtttaaaagtagaaggcaaagaattaaacatactgacatattgattttttaaaaagaaatttaaaactcatatctaacaatcacttgaacccgggaggtgaaagttgcagtgagccaacatcgtgccactgcactccagcgtgggcgacagagtaagactccaaatcaaaaaaaaaaaaaaagtaaaggacatcaagacaacgccagattctcagatgagacattttttagcaaataaatggaagtcacagccctcttgaaaccatttttccgccgttgctcaccaggaacatgccggaagagataggttccagacgcgggagaatgcggggccagagccaacctcaccagaagggcagaaatccttttcctttcggaaagaaaaaaactcccaaaggttgctttccaagcttttcaagagaggagcacagcggatgaaagtactcaagaaaacacccggcggaggcggaacaaacacacttcccgacgcagccagacggactgtgcggcctctcggaactggccagaggccgcaccaggaggactgacagcccctagaaaagcgagtgaaactaggcggatctgagaggctcctgggcgaccacgcccaatccttcctttgccgccccgctggtatgtcccggacccccaagcaggtagaactcaccacagcggggtggactccaccacaataaaggttaaacggcactgaccatgctgagccacagccggtaaagatggcggtggcacactgacgtcacttccgctccgagcctccggccgggtggggctccagggcttgagtttcaggcacgtaggacaaagaaattctagtttcctcctgggtgggtgccggacagtgcctggggttggctcagggagcgggatgcagaaacgggttcagagaaaaagatgagtttagaaccggacctctggacggaaccgtgggcgaggggtggggcccatatttgggggcggtttagaggtgggacccggcctagcccgcgtttcaggtgcccagacgggttggaaaggcggggatgggggatgggacgcaccccagaggatgctcctccaaagcttatcctgggcgggctcagtggctcacgcctgtaattccagcactttgggaggctaaggcaggtggatagcttgagtccaagagttccagaccagcctgagtgaaatagcaagaccgtgtgtctttttttttcttttctttttttttttttttttttttttgagacagagtttcactcttgttgcccaggcctgtgcccggctcgaccctgtctctattaaaatatatatataaggccaagcgccagtggttcacgcctgtaatccctgcactttgggaagccaaggcgggcggatcacctgaggtcgggagtttgacaccagcctggccaacatgctgaaaccccgtctctactaaaaatacaaaaaaatagctgggtgtggtggcaggcgcttgtaatcccagctactcaggaggctgaggcaggagaatcgcttgaacccgggaggcggaggttgcggtgagccgaggttgcgccactgcactccaatctgggggacaagagcgtgacttcatctcaaaaagaaaaaatatatatatatgtgtgtgtgtgtgtgtgtgtgtgtgtgtgtgtgtgtgtgtcaagcttttttgtatgccgctcctcatgttcctggagcctttccatgattcttccatattaaacctgccagtgatagatggcatggtctgtctcttccattcagtcattctttctgtaggcctttattttttctttttctttttcttttttttttttttttgagacggagtctctctctgtcccccaggctggagtgcagtggtgcaatctcggctcactgcaagctccgcctcctgggttcacaccattctcctgcctagcctcctaagtagctgggactacaggcgcccgcgaccacaaccagctaatttttttgtattcttagtagagacggggtttcacggtgttagccaagatgatccccatctcctgacctcatgatccacccgcctcggcctcccaaagtgctgggattacaggcgtgagccaccgcgcccagcctattttttcattctttattttatagaacctgctgtttccattgcgttttctttttacttttttttttttttttttttttttttgagactggagtctcactctgttgcccgggctggagtgcagtggtgcaatctcagctcactgcaacctccgtctcctgggtgcaagtgattctcctgcttcagcctcctgagtagctgggattacaggtggctgccactatgcccagctattttttctattttcagtacagagggcatttcaccatgttggccaggctggtctcaaactcctgacctcgtgatttgcccatctcagccttgcagaatgctgggattataggtgaagggggccagcccctccacacctgtgggtatttctcatcaggtgggatgagagactgagaaaagaaataagacacagagacaaagtatagagaaagaacagtgggcccaggggaccggcgctcagcgtccagaggacccacactggcaccagtctctgagttccttcagtatttattgattactattttcactatctcagcaaggggaatgcagcaggagaacagggtgatagtggggagaaggtcagcaagaaaacatatgagcaaagaatctgtgtcacagataagttcaagggaaggtactatgcctggatgtgcacgtaggccagatttatgcttctctccacccaaacatctcagtgtagtaaagaatagcagagcagcattgccaccagcatgtctcacctccagccacagggcagtgttctcctgtctcagaagagaacaatgtacattcgggatttataccaagacattccgttcccaggggcattcaggagacagaggccttcctcttttactaatgctcctcagcacagacccttcatgggtgtcaggctgggggacggtcaggtctttcccatcccatgaggccatatctcaggctgtctcagtggggagaaactttggacaatacccagctttcctgggcagaggtccctgctgctttctgcagtgcatcgtgcccctggttaattgagaatggagaatggtgatgactttcatccagcatactgcctgtaaacatattgttaagaaggcacatcctgcacagccctagatcccttaaaccttgattccatacaacacgttttgtgagcacaaggttggggctaaagttacagattaacagcgtctcaaggcaaaacaattgtttagggtacagatcaaaatggagtttcttatgtcttccttttctacatagacaaagtaacagtctgatctctttcttttccctacaataggcatgagcaaccacgcacagccacattttcaatataataatactttctataaatcttgattttttttttcttcaccaagtatgtatttctggctgggcacgttgcctcatgcctgtaatctcagcacactttgagaggccaatatgggaggatcgtttgaggccaggagttggagacaagcctgggcaacacagcaagaccctgtctccttaaaaaacaataaaatttttaaaaaattccttttttcttttattttttgcgatggagtctcgctctgttgcccaggctggagtgcattggcacaatcttggctcactgcaacctctgctccctggttcaagcgattcttctgtctcagcctcccaagtacctgggactacaggcctgcgccaccatgtccagctaatttttgtatttttagtagagacgtttcaccatattggcttggctggtcttgaactcctgacctcatgatccacccactttggccttccaacgtgctgggattacaggtgtgagccactaagcctgaccaaaaatatgtatttctattgttatttttctgatcttaccacatgggccaggaccgcatttcctatgttgtaaaatagcagtaataccagacattctccccaagtttattcagaaatgtaacataatcccaataaaaacaccaaaattttttctggagttaggtacattgatgctaaaagtttatatggaaaaagaaaatctgataataagcaagaaaacaaaaacaaggccgggcactgtggctcatgcctgttatcccagcactttgggaggctgagacaggcagatcacaaggtcaggagatcaagaccatcctggccaacatggtgaaaccgtgtctctactaaaaatgcaaaaattagctgggcatggtggcacgtgcttgtagtcccaactacttgggaggctgaggcaggagaattgcttgaacacgggaggcggaggttgcagtgagctgagatcgcaccattgcaccccagcctgggacagagggagactgtgtcaaaaaaaaaaaaaggaaaacaaaaacaaaagcaatgatgagcagcagatattaaaacatactattgacaattttcacgcaagacaaagaattattttaaaataaaaataagaaaacattctataaagcctctataattaaaactatgtggtactagtgcatgaagcagaaacagactaataaaatatctataaatagacccaagaacatgtagaaatttggttcataaatgtggtattttgctgggcgtggtggctcatgcctgtaatcctagcactttggtaggtcaaggcaggaggatcacttgagttcaggagttggaaaccagcctggccaacatggtgaaactccgtctctactaaaaatacaaaaaataggctcggctggtggctcacgcctgtaatcccagtactttgagaggccgaggtgggtgaatcacctgaggtcgggagttcaagaccagcctaaccaacatggagaaacccccatctctactaaaaatacaaaaatagctgggtgtcctccctctccctctccctctccccacggtctccctctcccgctctttccatggtctccctctgatgccgagccgaagctggactgtactgctgctatctcggctcactgcaacctccctgcctgattctcctgcctcagcctgccgagtgcctgtgattgcaggcgcgcgccgccacgcctgactggttttcatatttttttggtggagacggggtttcgctgtgttggccaggctggtctccagctcctaaccgtgagtgatccgccagcctcggcctcccgaggtgccgggattgcagacggagcctcgttcactcagtgctcaatggtgcccaggctggagtgcagtggcgtgatctcagctcgctacaacctccacctcccagcagcctgccttggcctcccaaagtgccgagagtgcagcctctgcccggccgccaccccgtctgggaagtgaggagcgtctttgcctggccgcccatcatctgggatgtgaggagcccctctgcctggctgcccagtctggaaagtgaggagcatctctgcccggccgccatcccatctaggaagtgaggagcgcctcttcctggccgccatcccatctaggaagtgaggagcatctctgcccggccgcccatcgtctgagatgtggggagcgcctctgccccgccgccccatctggaatgtgaggagcgcctctgcccagccgcgaccccgtctgggaggtgaggagcgtttctgcccggccgccccatctgagaagtgaggagaccctctgcctggcaaccgccccgtctgagaagtgaggagcccctccgcccggcagccgccccgtctgagaagtgaggaaaccctccgcccggcagccaccccgtctgggaagtgaggagcatctccacccggcagccaccccgtccgggagggaggtgggggtgtcagcgccccccgcccggccagccgccccgtccgggagggaggtgggggggtcagccccccacccggccagccgccccatccgggaggtgaggggagcctctgcccggccgccccttctgggaagtgaggagcccctctgcccggccaccaccccgtctgggaggtgtacccaacagctcattgagaacgggccatgatgacaatggcggttttgtggaatagaaaggggggaaaggtggggaaaagattgagaaatcggatggttgccgtgcctgtgtagaaagaagtagacatgtgagacttttcattttgttctgtactaagaaaaattcttctgccttgggatcctgttgatctgtgaccttacccccaaccctgtgctctctgaaacatgtgctatgtccactcagggttaaatggattaagggcggtgcaagatatgctttgttaaacagatgcttgaaggcagcatgctcgttaagagtcatcaccactccctaatctcaagtacccagggacacaaacactgcggaaggccgcagggtcctctgcctaggaaaaccagagacctttgttcacttgtttatctgctgaccttccctctactattgtcctatgaccctgccaaatccccctctgcgagaaacacccaagaatgatcaattaaaaaaaaaaaatagccaggtgtggtggcaggtgcctgtaatcccagctactcgggaggctgaggcaggagaatcgcttcaacccaggaagcagaggttgcagtgagccgagatcgtgccaatgcactctagcttgggcaataaaagcaaaactccatgtcaaaaaaaaaaaaaaagtggtgtttcagatcgatagggaaaaaatgccatttgtaatggaaagtctaagacagttggttagctatcagagaaaagatgaaattaaatctatacttcatatcatatacaatatactccaaatggactagtaatctaagtgtgaaaaataaaaccatacacgcatgtaaggtgttcaagtgatttcttggctgagtaaggaaaaagatgtaactacaaggcggcaatagcatacaagcttcatttgggatgtgctttcacaggttagcagttgcggaggtaggaaacagcaagagagtatccacaggcttctacctgtgggtcacttctcagaaagcgtggaaaggaagagagactcccagaggagaaagggaatcaaagagggggcttataaataactaaatgatgatactcaccaaactgacagcatatcttccagttaaaaagctctgaagggccgggcaagaaggctcatgcctataatcccagcactttgggaggccagtggggcggatcacgaggacaggtgttcaagaccagcctgaccaacatggtgaaaccccatctctactaaaaatacaaaaattagccgggcgtggtggcgtgcacctgtaatcccagctactcaggaggctgaggcaggagaaacactcgaagccgggaggtggaagttgcagtgagccgagatcttgccactgcactccagtctggacaacagagtgagactccatctcaaaagaaaaaaaaaaaaaaaggttctgcaggacagcagggggatgggattttcatagcctctggagttatcttatctatggctatcagatattgcacataatttcagagaatacaaagaaggcacactcgagatggctaaaaataggcttgttcatgctatgtttcaaacaatcaagtgtgttaaaattgcagtttggcagggattggctattgtgaatactagtgagataaacattggtgtacaaatatttctttgagcacctgctctcaacacttttggatatatatgccaaagtggaatgtctggatcatatggtaattctgtttaatcttgtttgtttgtttgagatagggtctcactctgttgtctaggctggaatgcagtgacatgatcatggattactgcagtcctcaacctactgagctcaggtaatcatcccaccttagcctctcgagtagcagggattacaagtgcatgccaccaccatgcctggctgaattaaaaaatcttttttgtaaaaatgaaatctcacaatatgcccaggctggtcttgaactcttagtctcaagaaatccctcaccctgagcctcccaaagtgctgggattacaggtgtgagccatcacatccagcatggttttgattttcattttcatgatgtttagtgatgttaagcatcttttcatgagcatcttttcctgtgtttattggccatctgtgtatcttctttggtgatattattcaagtcctttttctgtatttgaattgggttttgttgttgttactctcgggttctagaaattttaaaaataaactccagatatttgtccccagtcggatacaggacttgaaaatattttctcccatttgtagattgtcttttcattctcttgttattatgctttgatgcaaaaaatttgtattattgattaggttcaactcataatttttcttgtgttgcctgtgtggttgatgacataactaagaagtcatttccaattccaatatcatgaagctttctcacctatgttttcttctaataggttttcagctctagctcttacactacacttaggtttttgatccattttttaaaaatcatgccacattattattattattaagatggaggcttgctgtctcccaggctggagtgcagtggtgcgatctcagctcactgcaacctctacctcccaggttcaagtgattctcctgccattgcttcctgagtagctgggattacaggtgcatgccaccatgcccggctactttttgtatttctttttagtaaagacagggcttcaccatgttggtcaagctgatctcgaacacctgacctcgtgatccacccacctcggccttccaaagtgctgggattagaggcgtgagccactgtgcccggccatgccacattatttttaattatgtacaaagatctaaaatgtcactcagggaccatttcatccaccactctgtttggccaccagtcttttgtctgtctcttctgcaatagtgaggcggataccctttcctcggggaagagaaatccatggtctgttgcccttgccaataacaaaaatgttggaaaatctagtggcaaatctgttgcctttggcatccttcacgtaaaccactttgaaagatcgagggtgccgctctctgttgatcacaccaattcttcccaggttagcacttccagtcaccatacacaggttccagtgtcaatcttgatgaaatcagtaatcttgccagtctctaaatcaatctgaatggtatcattcaccttgataaggggatcagggtagcagatggcgtgagtatcaagagtcaccagatgagggattccttttgtgcccacaaagatttttctcagtttgcataacatgtacttggcctcctcaggtgtaatacgttgtacagcaaagtgacccttggtgtcacaggtcagttgggaattctctcccatcttgtcagtgttgatgacatccattaatccagcagggtaggttatatcagttcggaccttgccatcgatcttaaccgctgtgggaaaatctttacttcaactcctgtcagggcatacttaagtctcttccttaggaaaatgatgaggggtaaacactctctcaacttgtggggactggtggatggatgaggagaaacacaccagtcaatttatccaacattcaatactttggagctgctatccccttcagatgcttcttgggaccacgagccatggctgtgttaggcaaggaaagagttaatgatttttcatctttttttttttttttttttgagacggagtttcgctcttgttgcccaggctggagtgcaatggcgtgatcccagctcactgcaacctctgcctccccggttcaagcaattcttctgcctcagcctcccaagtagctgagattacaggtgcccaccaccacacccggctaatttttgtatttttagtagaggcggggtctcaccgtattggccaggctggtctcaaactcctgaccttgtgattcccctgcctcagtctctcaaagtgctgggattacaggtgtgaaccaccgtgcctggccttgatccattttaagttcattttatatatggtataaggttagggtctaactcccttcttatgcatgtctatatccagtttttctgctaacacttctcccccacctcccaccacaagctttattgatacctcattgacaaagaaaaactgtatatacttaaagtgtgcaatgtgatgtttagtataaacattgtgaaatgattaccactaccatactaatttatgtatccatcacttcacagtcaccttttttactgtgtcgagaacacttaaaatctgctgtcttagtaaactccaagtatacaatacagttttttgttttttgttcttttattttttttgagtcggagtctttctctctcaccaggctggagtgcagtggtgtgatcttggtttactgcaacttctgcctcccagattcaagcgattctccttcctcagcctcccaagtagctgtgattacaggtgcacaccaccatgctgggctaattttttgtatttttagtagagacggggtttcaccatgttggccaggaaggtcttgatctcttgacctcttgatccccccacctctgcttcccaaagtgctgggattacaggcgtgagccaccacacccagctggacaatacagtattgttaactaaaatctccatgctgtacattaaattcctgaatttcttcatcttgtaattgaaagtttataccctttgactaatgtctctccagtctctccccattctcccagtccctggcaaccaaaattctccacttttttttttcttcagatggagtatcactctgtgcccaggctggagtgcagtggcaggatcttggctcactgcagcctccgcctcctggcttcaaaggattcttgtgcctcagcctcctgagtacctgggattacaggcgcccacgaccacgcccggctaatttttgtatttttagaagagatggagctttaccatgttggccaggctggtctcgaactcctgacctcgtgatccacctacctcagcctcccaaagtgctgggattacaggcgtgagccaccgcgcccagccagcattctcctctttgcttctgtgagtcaaggactatgtggctatgttacagcccacatatatgtgagattatacaagatttccttctctttttaaggctaaataatattcacatatataatcacattttcttcatttctaaatgtccaggaacatttaggttgtttccatacttgtctattatgaagaaggctgcaatgaacgtgggaatgcagatatctcttcaagatattcacgtcatttcctatggaaatatacacagtagtgggattcctggatcatgatggtattgttaatggaaaggcgtctggatccagaccccaagagagggttcttggatcttacacaagaaagaatttggggagttcataaagtgaaagcaagtttattagagaagtaaagaaacaaaagaatggctactccataggcagagcagtggtatgcactgctctattgagtatacttatggttatttattgattatatgctaaataaggggtgggttgtcaataagtttttcaggaaaggggcagagattttctggaacctagcatccctctttttttttttttttttgagacggagtctcgctctgtcgcccaggctggagtgcagtggcgcgatctctgctcactgcaagctccgcctcctggattcacgccattctcctgcctcagcctcgtgagtagctggaactacaggtgccggccaccacacccagctaattttttgtatttttagtggagacggggtttcaccgtgttagcctggatggtctcgatctcctgaccttgtgatccatctgccttggcctcccacagtgctgggattacaggcgtgagtcaccgcgcccggcctacatccctccctttttagactatataggtaaacttccaaacatggccatgacatttgtaaaaagtcatggagctggcggaagtgactttttagcatgctactgcattataattaacctataatgagcagtgaggatgaccagaggtcacttttgtcaccatcttggatttggtgggatttggctgggttctttaccgcatcttgttttatcagcaagctctttatgacctgtatcttatgccgacctcctatctcttcctgcgactaagaatgcctaacctcctggaaatgcagcccagcaagaaaaaaagaaaaaagactgccttttctccattgaaggttcttggcaccatggtcaaaagccatttgattatatctgtgaaggtttatttctggtctctttatgctataacaatggtctccatgtctagttatgcctataccacattgttttgattactatagctttgtagtaccattttttctgctttttttcttgagacaggttcttgctctgttgtccaggctggagtgcaatggtgtgatcacagctcactgcagggtcgacttcctgggctcaagagatccctcctatctcagctcctgagtagctgggactacaggcatgcaccaccatgccaagctattttttatttttattttttgtagagatgaagtctccttaagttccccaagctggtctcaaactcccgggctcaagcagttttcctgactcagcctcctgaattgttggtattacaggctagtaacttttgacatcacaaagtctgaattttccaacaatccttttttttttttttttttttttttgagactaagtctcgctctgttgcccagactggagggcaatagcatgatctcagctcaccactggctaatttttgtgtttttagtagagacagggtttcaccatattggccaggctggtctcgaacttctgacgtcaaatgatctgcctgccttagcttcccagagtgctgggattacaggcttgagccaccttgccctacccaacaaacttctttttcaagattgctttcactgtgtggactccagtgagattccatatgtgtgtggtcttttgtaacccaaacttcagcagtgacttaacatgatttttgccacattctgctagtcacagagacgaagcctgctacaatgtgagaggactacacaaaggtatgagtattgagaagcagagattattgggggacaatttggaggctggatactacagagaaggaattggcaatacccaaaaacactacctgtgcaatctggaaaccgttttcttttttttttttttttaattttgaggcagagtatccctctgttgcccaggctggagtgcagtggcacgatctcaactcactgcaacctccatttcctgggttcaagtgattcttgtgcctatctccctagtaactgggactacaggaatacaccaccacacttggctaattttttttaatttttagtaaagacagggtttggccatgttgcccagcctggtctcaaacttctgagctcaggcaatccacccccttgccctcccaaagtgttgtgattacaagtgtgagccaccgtgcacggactttttcttttccctttttttttttttttttttttgagagagttttgctgtgtcccccaggctggaatgtgcagtggtgcaatctgggctacctgcagcctccacctcccaggttcacgcgatgctcccacctcaacctccagagtagctggggactacaggcatgagccaccacacccagctaatttttgtatattttttagagatgggctcaccattttactcaggctggtctcgaactaaggagctcaaagtgctggggttacaggcatgggcaactgtgcctggccttgcaatcctactttttttttttttttgagatggagtttcactgttgttgcccaggctggagtgcaatggcatgatcttggctcatcccaacctccacttcctgggttcaagtgattctcctgcctcagcctcctgagtagctgggattacaggtgtgtcaccacaccctgctaattttttgtatttttagtagagacggggtttcaccatgttggtcatgctgttctcgaacccctgacctcaagtgatctacccacctcggcctcccaaagtattgggattacaggcatgagccaccgtgcccagccacaatgctacttttaagaatttttttttatactaagtccaggattcagtctaaacttctaagaatttgccttaaaggtaaacctttaacaattcaaataagttcaacagtattaattgcagcactgtttgtaatttcaatttgaatgcctaaatgctctcaagtattagagtatctgaatatatggtacatcaaccagtggagtatcctgcagctctagaaatgaatgaagatctctatgaactcacattaagtgatttccaagatacatggttaactaaaaacacaaactccatctcaaaaaataaaattttgtgtttttaacctcatttatttaaaattaaatgaatttgtaagccatttgttctgtggtattctgttatggttgcctgagctgattaaggcagattttggcactgagaagtgaggcactggaattaaaaacaaacaaacaaataaaaaaactaaaaatgtgaagcagctttgaaactgacaaatgagtagaggctggaaaaattctgatttgcaagctggaaataatagtaagggtgattctggtgaggtgtcattggggaatgaggaacatgctattgggaaatgaagaaaagacaaccctttatatgaagtggtgaagaacttagcaaaactgtattctagcattttgtggaaggtagagcttgagagagataaaactgggtatgtatcactaagatctgtaattaaagtgttaaaggacacaggaagcttcattcttcctgactgcttatagtaaaatgcaaaagaggagacctgaattgcagaagaaattgttaaagaaaaaggaaccagaacctggagatttggaaaattctcagcctatccataatgcaaaaattagaaaacttgtactgaagagaatcctgaaagtgtggctgaacaatcatttgacaaagagatcatgagtgggattcatggactatatcagccatcttaacagacgtgagcacaaagactggattatactagaagagacacttccacttaggttgtgccacctaaaatggacagagaagacagaacaggtaaggctgtcacatatcatagattttacaagaaggggacacagaaataatcagctgtgaaagtgcactggcagttaaggatggtttcatacctgccatgctctgcaggatccgtgggaacagaagagacccttagaggagcatcttttaacaacccacctctggggcctacatcatcttggcttctgggaaattttgacatgaatgtgccacactggcagctactaacaggggctgggaccaatctagatgacttatctcatacagaaattcttaatgctatgatcttagaaacctaatcaccaaggtaaggtagcctgcagtactgacctcaccatccattacccttcttcacagatgcccagactcaggcaaccatgatgttgtattcagaacctgtaggtttaatttcagacccttgtgatggcacccaaggccaattcatgagccattacaacctccaaaaggcatttaggacaaatctgaatatctttagtgtcactgccactaattaaagatggcaaccaatgagctaaatggtaacattcatacccttatattcatagggttcctccccagtgtgaattctttcatgtctacttaggtgtgaggaaacagcaaaagctttcccacattctttacatatgagggctttctctctggtatgagtttgcaggtgaacattaaggggtgaggaatatagaaatgctttcccacatatcttgcatacaaagggcctttcttcatggtgagttttcaaatgtttactacgataggaagaagtaatgaaggtcttcccacattcaacacatccataaggcttctctcctgtgtgaattattttatgttgagtaagggttgaggatccattgaaggctttcccacattccttacactgatagtgtttctctccagtgtgatttcgtatgtgtatagcaaggcccgtgtactgagtgaaggcttggccacattccttacattcatagggttttattccagtgtgagttcttacatgttgagtaaggtgagttgacctagtgaaggctttcccacattccgtatatttgtgtggttttattccagtgtgaatttgaatgtgaacattaaaggatgaggaatttctaaaggatcttccacattctttacattcaaaggacttctctcctttatgaattttcacatgtgcagaaagttgagaaaaattagtgaaggatttcccatgtttcttagtctttttagatttctttccagtatgaactgttacacactgctttaggtgtgaggaatgagtgatggctctcctacattcctgaaattcacagaatttctctccaatgtggattcccatgtgattatcaaggcttgcaaaatacttaaagccttttctacattccttacatttgtatggttgtcttgcattgagaattccaagatgtgcagcaagatctggagttaaggtgaagacttttccacatggattaaatttggaaagttcctgtccaatagaggcttccttgtgcacactgaggatgtcttttccataacaattaccctcaaagatgttccctccattctgagctctcatgtgtgttttaaggcaaaaccattcactgaagacctctccacaattctcagagtttccatccactgtagcttcttgtctgctgatgaagggataaaggatttaaaatgttttcagacatattaagagatttcacccatctgaacacagaaacattattttggtgacaattatcattttactttttaatgtttaatttttttttcatttcctaccctcttgatttcttccagattgaatgatgggatcttttgctagaattttatgccactggctctaattactcaaaaaaaaaacaactgtttttaattgttgggggtggtttgagacagggtctcactctgtcacccaggctggtaccatggcagaatcacagctcactgcggccttaatctcccaggctcaagtcatcatcctgcctcagtgccccaaggagcttcgactacagttgcatggcaacacacccagctaaatttttattttttgtagagacagggtctccctgttgcccaggctggtcttgaactcctagactcaagtggttctcctgcctcagcttcccaagctgctgggattacaggcatcagccattgtacccagcaaaatagtgtagattttcatgaaactgttccaatcctcaatgtctagttacatatgtgggaatatgtacttgtcggtattttgcagtgacaagttatataggtatggaacatcacaaaattcatcacattcagactatctctccagagactttgctccctcaatggtgcaggctacttctctaattctcttaagtatctctcatttgtgctgtttctttttcattgcacactccacctcccaggtttaagcaattctgcctcagcctcccaagtaactgggattacaggtgcccaccaccatgcctggctaattttgtatttttagtagagatagaggctagtctcaaagtgctaacctcaagtgatccacccaccttggcatcccaaagtgctgggattacagactcagtttattttccttctttctttctttcttttttttgtgagatgaggtctcactccatcgcccaggctggaatgaagtggtgcaatcttggctcgctcagtaacctccacctctgggttcaagtgattttcctgccacagcctcccaagtaactggtatgacaggtgcccaccactacacttggttaattttgtatttttagtacagacggagtttcaccatgttggccaggctagttttaaacccctgacctcaagtgaccacctacctcaacctcccatagtgttgggattacaggcatgagccaccacatccagcctctttttaaaatcagagatgggatcttgctatattgtctaggctggtcttaaactactggacttaaatgatcctcctacctcagcctccctagtagctgggattacagaagtaagccatagttctgaccgtgctgatttcctagaatggaattctcaatcttttctgagaggaaactaagaaatatcactcatcctgccatttgtatcccattgaatattggattcctcaaaaaaccaagctgaagtgatgaccatttggttctaggttgtatttcccattctgaagttaagcagaaaaagaaatgtaaggatttatagaagaaatgtttaaaacgatgagtcatttgtacttgttttctaattaaacacagtaataaaagataggccagagaactttgaggattttgatatgtcaaaaatttggctataaggacgtggggtttattacacaattgatgtgtttagatagtttattacaaactgcttctgtgaaaaatgaaacaatagggaagaggaagagaagattatcaggaaaggaaagtaggaaagattgggataaagagcatgtatcaaaatgataaagttaacaaaaaaaagaacaggtagttttgttaggtcataggaatgtttgactagatggaaaataaaagtcagagatatctgaaattctgagaaaaatagcttaaatcttctgaggtaaagtggatctttaaaaatattttttttatttttttgagatggagtctcactctgtcacccaggctggagtgcagtgatgcagtcttggctcactgcaacctctgcctcccgggttcaagtgattctactgcctcagcctcccgagtgcctgggactacagggatgtgccaatatacccagcaaattttctgcatttttattagagacggggtttcactgtgttagccagtctggtcttgatttcctgacctcatgatctgcccaccttggcatcccaaagtgctgggattaaaggcgtgagccaccaagcccggcctagtctttatttttatgattttttttttagagatgcggtctcacaatactgtccatgctaatatcaaactcccacactcaagcacttctcccacctcagcctcccaagtatctgggactacaggtgcagggcaccatgccaagcaaaatgatgttactcttacccacagaggccaggttcacatagttctccaacatcacatctctgtagaggcatttctcagttgtgtccagtaaagcccactcctctggggtgaactccacagccacatcatcaaacgtcactgaatcctaagtcatcacacacatgccggtttgagccaatgaacactgccatgaatgttcactggagaatgaggaaggggaaacttatactcacttatatgtggttctgagctctcccaagatctactccagtgtttaatgtctcaggagctcttgtgtctaagcaatcaaggtgaacctactagaggcatatgccttgaacagcactttaaaaatttttttaattctttttttgtttgatctatttttaatttttaaatacttttatttttaaattttaaatttttattttgatgagaacagtacttcctaagcatgaatttttacctatcatctatctatctatctatctatctatctatctatctatctatctatctatctatctaatctgtttatttatttctatataaagacagggtcccactgtgtcacacaggcacaatcgctgcttactgcaccttcgatctcctgggctgaagttcccctcccaccccagcctcctgagtagctggaattacaggcatgagccactgcacactgcttacactttatctcagcacaaccagtttaggagctcttcctgtcccattggtgtctatgccgcacactcctcagcacactgcagatacctgataaatgctgataagtgaataatttgataaaaggacactttcatcagctttatcatctgtcactgcacccagcaatgtaagaaagatgcagttggcaccatgaaggtcaagcttaagtagtaattactgagctactggactgattttcaagttaacactttatgtataggaaacttcattccctggggaaattcatctggggactcagtctttgagtaaggcttcatttgctctaagaaaactctggagatgagtctgtctagaaggaaatatgtctacctattggatgtaagcatgtcattttgtacaatggcacattttctttttacctgataagaatttgccaggtagtcctccaccatcgttcctatctttgtcttttcttcaaaagggcagattggttccctgggaaaaaaccctagtggaaaagtaagaaggcatgagaagccaaagctgcccacagtctcatgcccagaagtcattccatcctagcttgaaattcccatatgctcctgcacactcgagaaaactacacacacacaacactttcatgaaatgccatagtagtcctgtgtcacctagactcagataagcagacatgggccaaactgcctgttgggtaaagggatatagcttcatttttcaaggaaacttacaccctgaaaaatgtgactatctatctacccatagtagtaacactcatgaagcttatgtagcatttcctaagacacacaaaccagggctgaattctaaaacagcattctgactgggcacagaggctcatgcctgtaatcccaatattttgggaggccaaggtgggcaaatcacttgaggtcaggtgttgaagaccagcctgaccaacatggcaaaacctcgtctctactaaaaaaataaaaaataaataaaaaaatacaggagactgaggtaaagaattgcttgaaccagggaagcagaggttgcagtgagtcaagattgtgccactgcactacagcctgggtaacagagggaggctccatttaacaaacaaacaatattagccaagcctggtgatatgtgcttgtggtcccatctgcatgggagactgaggcaagagaatcactttaacccaaaaggtggaggttgcagtgaactgagattgcaccactgcactccagcctgggtgagagagcaagattctgtctacaataaataaataaaacaaaacaaaacaaaacaaaatagtattctacatcttacttcaattcctcctaaaagaaccagtggtggctcatgcctgtaatcccaacactttggcaggccaaggcaagcaaatcacttgtggtcgggagttcaagttcagcctgacaaacactgagaaacccgtctctactaaaaatacaaaattagcctgtaatcccagcgactcgggaggctgaggcaggagaatcgcttgaacccaggaggcagaggttgcggtgagccgagattgcaccattgcactctagcctgggcaacaagagtgaaactccatcttgaaaaaacaacagaacaaaacaaaagaaaaaaacagtggcatgcctgctcaggcccagcgcactggactcttatgttgtggaggacgacctaaatcagaatctctgaaaaagagcatcaacaaggacttaccatgggacaaatcagtgactgccattctctgaagctgatggtcagttgtgcctcaatgctctcttccttgatgccaagattgcctcagggcaacttatgaatctaggtgaatagaggcaatctccattcctctttgtacagggttatttgaagtcctgtttgtatcaagcatcaaacatcagtcatcgaacattatgcatgagctttctcgctgcaggtgacaaatgtgaaggccaccaaaaactgtacactcagtatcgtcactcagtaatgatagtattaataacagcaactgacatttactgaggcctagtatgtcagaagtagctctactagctatatacatgctcacttaattatcataaccatccttcccaatagctatcattacctctatctgtctatctatctatgtatctatgtatctatgtatctatgtatctatgtatttatgtatctatctatccatccatccagacagggtctcactctgttgcccaggttgaagtgcaatggcactaacacagccctctgtagcctagacctcccaggctcaagtgatcctcccacctcagtctcctgaataggtgggcccacaggtgtgcatcaccacaccttattatcattattattatcattattattactattattattatgagacagagtctcactctcccacccaggctggagtgcagtggcacgatctcgactctgtaacctctgcctcccaggttcaagtgattgtcaggcctcagcctcctgagtagctgggattacaggtatgcaccatgcctggctaatttttgtatttttagtagagatggtgtttcgccatatcagccaggttggtctcaaactcctggcctcaagtgattctcccacttcagcccccaaagtggctaggaatacaggtgcacaccactgtgtggggaaaagaaatagagaccagatttttactgtgtctatgtagaaaaggaagacataagaaactccattttgatctgtactaagaaatattgtttctgctttgagatgctgttaacctgtaactttagccctgaccctgtgctcacagaaacatgtgctgtaatgaatcaaagtttaattgatttagggctgtgcaggatgtgccttgttaacaatatgtttgcaggcagtatgcttggtaaaagtcatcaccattctccattcttgattaaccagggacaaaatgcactgcggaaagccgcaaggacctctgcccatgaaagcctgagtattgtccaaggtttccccccactgaaacagcctgagatatggcctcatgggaaaggaaagaccttaccatctcccagcccaacacccgtaaagggtgttgcgggaagtcaaggaccccaaacggagggaccggctgaagccatgacagaagaacgtggattgtgaagattttatggacatttattagttccccaaattaatacttttgtaatttcttatgcctgtctttactgcaatctctaaacataaattgtaaagatttcatggacacttatcacttccccaatcaatacccttgtgatttcctatgcctgtctttactttagtctcttaatcttgtcagttgaggaggatgtatatcattccaggaccctgtaataatcgcgttaactacaaaaattctacagcatatgtgtttgagcaatatgaaatgtgggcacgctgaaaaaagaacaggataagagcaattgttcagggaataagagagataaccttaaactctgaccgctggtgagccaggcagaacagagccctatttctcttctttcaaaagcaaatgggagaaatatcactgaattccttttctcagcatggaacatccctgagaaagagaatgcacacctaggggtaggtctctgaactggcccaagcccccccgggggcgtacctgtctcttatggtcgagattgcagaggtgaaataaactccagtctcccatagcgctcccaggcttattaggaagaggaaattcccacctaataaattttggtcagaccggttgatctcaaaacctgtctcctggtaagatgttatcaatgacagtggtgcccgaaacttcattagcaattttaatttcacctcggtcctgtgatctcgccctgcctccacttgccttgtgatattctattaccctgttaagtacttgatgtctgtcacccacacctattcgcacactccctccccttttgaaaatccctaataaaaacttgctggtttttgtggcttgtggggcatcacggatcctaccaacatgtgatgtctcccccggacacccagctttaaaatttctctcttttgtactctgtccctttatttctcaagccagccgacgcttaggaaaatagaaaagaacctacgtgattatcggggcaggtcccccaataaaggggtctgtgctgaggagtagtgaaagagggaggcctctttgcagttaagaggaaggcttctgtctcctgccaatccctgggaatggaatgtctcggtgtaaagctgaccattcccattcattctattctgataggagaaaaccaccctgcagctggaggtgagatatgctggcagcaatactgctctgttactctttgctacactgggatgtctgggtaaagagaaacataaatctagcctatgtgcacatccaggcacagtacctttccttgaacttattcatgatacagattcctttgctcacatatttccctgctgaccttctccccacctgttgccctgctacacttccctcgctaagatagtaaaaataataatcaataaatactgagggaactcagagtctggcgccggtgcatgtcctccttatgctgagcaccaatcccctgggcccactgttctttctctatactttgtctctgtgtgttatttcttttctcagtctctcgtcccacctgatgagaaatacccacgggtgtggaggggctggcccccttcaccactaggtctaattttttgtatttttagtagagacaaggtttcaccaggttgcccaggctggtctcaaacccctgggctcaaacaatcctcctgccttgacctcccaaagtgctgggataataagcatgagccaccgcgcctggctcattacctctatttaatactgaaaaaatcctacattcaaataaccctaataattagtctgatatttgtccttagagcctgatctcctgtggatgctgttaccccctaatatgaccaggaggcagtccagacctgcacagaacacttaagtagtcaccagccacgtgtgttattgctaacttcactatgtacctaagatgactgaagaacagaatttaaaatattcaaaagatggccaggcgcggtggctcacacctgtaatccctgcactttgggaggctgaggcaggcagatcacctgaggtcaggagctcgagaccagccttggcaaacatggcaaaatgccatctctatggcaaaacgccatctctatggcaaaaccctgtttcaccatgttggcgaggctggtctcaaactcctgacctcaggtgatccacctgccttggcctcccaaagtgttgggattacagatgtgagccagggtgtctggcatgcccttcttaagtagaaaggcttgtagctggtaacaactagaaaacaaataacgtccaagaaaataaaaatttaaaaaaacgaaaggcctacagtctacacgtgttcttatttacatacagaaatagacacaccctaaacaactatgttttttccatccaaatgtaatgtgtcaaaaataagcaaaggacaccaaggcaatgccagattctcagatgagacattttttagcaaatatatggaagtcagagccctcttgaaaccaatttaacaccggtgctcaccaagaacactccggaatcgccaggttcctgacgcgggaggatgcggggccagagccaaccttaccagaatggcagaaatccttttcctttcggaaagaaaaaaattcaccaaggttgctttagaagcttttgaagaggggagcacagcggatgaaagcactccagaaaacatcccatggacgcgggataaacacacttcctgacgcggctcctgacgtggaccgactgaacctgcagctgggaactggccacgctgggaggaccaacaacccctggagaagctagtgaaatgagcaggatcagagaggctcctgggcgagcgcacccaatccttcctttggcatcccccgcctgtctccaggacccccaagcaggggcggaactcaccacagccggggtcgactccaccaagataaaggtgaaacagcactgaccgtgggcagccagcgcgggaaaagatagtggcggcgggctgatgtcacttccgctacgagcttcgggaaggacggggcttctgggatccagtttcagccacgtaggaccaggttgttagaaatgcttgttccccggtgcataaagaaatagcacttgaacataaatttaatttcctcagtaagcccattttacttttggcagaacaggtacactagccagcagttttgccactagagtacactaaacaaaggaaacagggtcatttataacctgacgtgtccaccctactgcagcgtccggtttccattggctggaatggaacatcacattctgtatttgacccggttggctaccaagtcagaactttttaaaagaagcaaaggcagaggagaacaaaggaaggaggaaataacttgtggaatgctgagaaagctaaaaacaccttcaaataaggaagaggaacaggctatgacctaatgcttgcttggaccagtataagcatgccagggcaaatatttaggctaaattgtgagagctaagaacataaagtacattgatttctttattacacctcacagatacttaagaatgttagcacaggtctttgaatgcatttcgctcctaagaagagttactatttatttctaattagatggagagtaaagtctctttgaagaggaacctctacttttcagggtcgaacacagaaattctagtttcctcctgggtgggtgcagacagggcctgggttggctcagagagtgggatgcagaaacaggttcagagaaaaggtgaggttacaaccacgcctctggatggaactgtgggtagagggttggggcccgtacttggaggtggcttagaggttggacccggcctagcccctgctacaggtggacagatgggctggaaaggctgggataggggatgggacacaccccagggaatgctcctccaaagcttttccccagtgggcgcagtttcgttcttgttgcccaggccggcacctggctcgaccccgtctctattaaaatatatatatacatatatatacacacatatatatacatatatgtgtatatatacgtatatacgcatatatacacatacgtgtatatatacgtatatacgcatatatacacatacgtgtatatatacgtatatacgtatatatacacatacgtgtatatatacgtatatacgtatatatacacatatatacgtgtatatatacacgtatatacgtgtacgtatatatacacgtatatacgtgtatatatacgtatatatacacgtatatacgtgtatatatacacgtatatatgtatatatacacatatatatacgtgtatatatatgtgtatatatatatagccgggcgtggtggctcatgcctgtaaaaaataaaataaaatatatatatgtgtgtgtgtatctacataaaacttttttgtttgcctctcctcatgttcctagagcctttccatgattcttccacattgacaaagatgccagtgaatggcatggtctatctcttccattcagtcaggctttctgtaggcctttgtttcttcattctttatttcttagaacctgctgattccattgcattttcctttttttttttttttgagacagagtctcactctgtcacttagagaagagagacagaccctctcatattgttttatattgttttatactcagaaaaagaaagaaaagcaaaactaaaggcaggtagcccagcacctaggaaccagatctgaaaccaggcctgggcctgcctgacctaagcctggtaattaaagatccacccctgacctaaccggttatgttatctatagattccacacattgtatggaaaggcattgtaaaacttcccggtctgttctgtttcactctgaccacaggtgcatacaacccctatcacatacctgctccttgctcaatcaatcatgaccctctcacgtggacccccttagagttgtgagcccttaaaagacacaggaattgctcactcagggagcttgactcttgagacaggagtcctgccaatgctcccggttgaataaacctcttccttctttaactcggtgtctgaggagttttgtctgcgccttgtcctgctacatttcttggttccctgactgggaagtgaggtgattggtggatggttgaggcagctccttaggtggcttaagcctgccctgtggaacatccctgagggggaccacgaccagcccgagcaatgcagatcctgagagtactcccaggtaggcatttgccctggtgggacaccttgccagagcagtgtgtggcaggcccccatggaggatcaatgcagtggctgagcacctggaaggaacgggcacctagagtcttgacatctaaaacttggtaagactagtctttggaacttgccactccgttttagtggaagtgtggcctgatcacccacggtgtgcctttatcagcactttggttttggttttggttttggttttgacttggtttgaattgcttgacaggaccagtcttgggaacatgcccactccatttgagtggaagcatggcctgatcacccatagcgtgcctttattggcactttagttttggttttgacttggtttgaattgcttgacaggactggtcttgggaacttgcctactccatttgagtagaagcgtggcctgatcacccacggtgtgcctgtactggcactttggtttttgtttttgacttggattgcttgatactttggttttggttttgacctggcttggatttctggatagtctgattttggttttgattttggtttagtgtaaactacaaaggtgtgtgtgtgtgcccttttaacccgttctttgttttgtggtgtgcatgtggtgtgagcgtggtgttttgtctcgaggaaacaggggtgaggcaaaagtaagcccacctcactaggaactatgttgaaaaattaaaaaaaaaaaaaaggagatttaaaggagactatggagtactatgacaccaggaaaacttaaaactttgtgtaagatagaccggccagcattagaagtaggttgaccattagaaggaagcctggacaggtcccttgtttcaaaggtatggcacaaggtaacctgtaagccaggacacacagaccagctcccgtacatagacacttggttacagctggttttagagtcccttcccccaacacagaatggttgagagaaaagcagcataggtggctatcagaggcaaggaaagactagcagagagagagaaaggaaagatacagagaggaaaagaggcaaagacagagagaaagagacagagaggaagagacagacaaagagggagtcaaggagagagagagagagaaagaaagagagaggcagagagagagaggaagagacagaggcaaaaggaaagtcagagagagacaaaatcaaagacagaaaaaaagagagaaagagatagacaagtagttaagaaaaaaaaagccgtctatacaaattctaagttaatttggacaaaacaaggtcttattaatagcaaaggataattaaaatcccaaacttacaaggttttcaacaaaagtaaagtttgctaaaagttaacagcgtaacatgtattatagtaacttctattcttgtggccttagacagtctagtccacagacataaaaaaaaaggttcactttggaagagaatggttatcatcttcaaaaaaaagagttataaaaaaagtgtgttaaaaaagaatttatgcaagaaatgttgtataatttaaaagtaattagtcctcctaaatgtaaaactattgaagagacagtttatgtgcaaggtgtataaggaaagtaaagtatatctttggtaaaaggattataaggaggcataagaatgtggatttttacctacattaaaaggttaaaaatatgtatattttgttttaaaggtttaagcaagttttgaaacgttaattgggtgtaaattctgtgggtaaatatattagctaaaattaaaggggtatcatccagtttctctgtatactggatattaaaataaaagcataacaggtttttcttaaagcaccaacctgctctttagcaaaaattttaaaaggttaaaaagagtctataaaatcttaccttatggtcaaacattaaaaattagataaatatgtctacaagtttttattaaaattaagtttaacattaataacacactaatataaagataaaatttagcttatctggtataaaaataataaaagaagcattattaaatataaaatggtgtttagcttcctttggtctaaaaaccaataaaaataggtgctaaaggaaatttctcagtaaaaaggcactaaggactataaagtccactgccaaggtccccacatttaaaacaaaaggtcaatttcttagaaattatatacttgatttatcttccacttccctttccctcaaaactaaaagtcttttagcacatgtaccacccctagaatttccggtcaaccagcaccaggctgaagatcatgttctcattgaaaggtggaaagaagaaaacctcgagccagcctgtgaaggacccttccttgtgctgctaaccaccaagactgctgtttgtacaccaaaaaggatggactcatcacacccgagtcaagaaagcgccaccctctccagagtcatgggccataatcccagaagaaaaccctaccaaactaaagctaagaaaaatttaactgtttttcatctattctattactctttcttctttccgcactctattgatgaccatctagttattaacataaccaagtcaatttcacctcaaactattgcatttaatacttgccttgttataccctgtggggacttgccaagtcaaagacagctctctacttctgaaaagtacttctgtccctcctgactctcctcagactgggcattagtaaactaggaccatttaatttggggagatttcgataaagaccccagtgacaaccaagagtcttgcccccacaatgtagagctttcatgccatagttggtccaacgttctgtggaccactaaagagcaaggatgactgccccaaccggtttttgtaatttcctaaaaccatacaatcattttactagaggatcatagaagttaaagacttaaaacaaactttagcaattaagacaggataccaagatgtaaatgcctggttaaaatggatcaaatattccatctgcatgttaaacaaaagcaattgttatgcttgtgcacatggcaggccagaggcccagattgtccctctttcactaaggtggtcctccagtcaaccaggcccaggctgcatggtagctgttttccaggattctacagcctggagtaataagtcatgccaagctctctctgctatattccgaagtctggtaccctgtgggttagcccccaggagatatccagcttccgtctcccaacactaaggtcacttcctgtctctcacgacagggaggaaacttagcattccttagagacctgaagggatgcgatgagcttaagaattttcaagagattatcaatcaatcagcccttgttcatccctgagcggatgtgtggtggtattgtggtggacctatactgggcactctgccaaataactagagcggcacttgtgctttagtccatttggctatccctttcaacctggcatttcatcaactagagggagaaaaataagacatcctaaattaagagaagccccttatgggtctttcaactatcacatctatttagatgcaattggaggcctgcaaggaataccagatcaatttaaagcttgaaatcaaatatctagaggatttaagtcaatattttagttggtgacagttaataaaaatttagattaaataaactacatctattacaaccaacagcaacgagcttttcatgagttaaaagaaaaactcaggtcggccccagccctggggctacctgacctgacaaaagtttttacacagtatgagtcaaaaaaaaaaaaaaaaaaaaaaaaaaaggcagttggagttttaacccagactgtggggccctggccaaggccagtggcctatctctcaaaacaactagacagggtttccaaagcctggcccccatgtctaaaggccctggcagcaatggccctgttagcacaagaagcagataagctaactcttaggcaaaacctaaacataaaatccccccatgctgtggtgactttaacgaataccaaaggacatcattagctaacgaatgctagtctaactagataccaaagcttgctctgtgaaaatccccgcataaccattgaagtttacaacaccctaaaccctgccaccttgctcttggtatcagagagcccagttgaacataactgtgtagaggtattggactcagtttattctagtgggcccaacctccaagaccatccttaaacatcagtagactgggagctgtacgtggactggagtagcttcaccaaccctttcaaagtgactctgaagaagacgacaagagttgctccagtcacacccggaagctgactggtccacgcacagctgaagcatgagaaaactcatcatgggactcattttccttaaattttggacttgtacagtaaagatttcaactgaccttcctcagactgagggctgttcccagtgtatacatcaagtcactaaagtaggacaaaaggttgctacgttcctattattttacggttattataagtgtactgaaactctaaaaaagaacttatttgtataatgttattctatacaaagtatgtagcccaggaaatgaccaacctgatgtgtgttatgacccatctgagcctcccatgaccacagtttttaaaataagagtaagaactgaggactggtgggtgctcataaacgatacgagtaaaatgttagccacaaaaaaaaaagaggtgcctgaacgagtcaccttgaaattcgacgcctgtgctgtcattaatagtaataagttaaaaataggatgtggttctcttaattaagaaagaggctatatgacagaaaataagtatgtttatcataaattaagactgtgtaaaaataaatgtagatactggtcttgtgtcatttaggctacttggataaaaaatgaaaaaatgcagtccaccttcaccaagggaaaagtggccattcctgtaccagtggtccgtataaccccttagaactagtaataacaaacccctttaatcctcgctagaaaaaaggggaatgtgtaaccctagaaattgatggagctggactggatcttcaagtaaatatcgtggtttgaggaaaagtttataaaccctctcctgagccagtatttcaaaccttctatgatgaactgaatgtgccagtaccagaaattccaggaaaaacaagaaatttgtttttgcaattagccgagcatatagcccagtctctcaatgtcccttcatgttatgtattagcacaagtgtactgtatgaatcattatcaatctattgcacaggaagacataagtagcaaaaataagagtgagaattcccactaataaaaagtgagagtctcaaagccgggaaatgagagaagacagaccctctcatattgttttatgttgttttatactcagaaaaagaaagaaaagcaaaactaaaggcaggtagcctggtgcctaggaaccagaccctaaaccaggcctaagcctggtagttaaagatcgacccttgacctaaccagttatgttatctatggattccagacattgtatggaaaggcattgtaaaacttcccggtcggttctgtttcactctgagcaccggtgcatgcagcccctgtcacgtaccccctgcttgctcaatcgaccacgaccttctcacatggacccgcttagagttgggagcccttaaaagggacaggaattgctcactcggggagctcggctcttgagacaggagtcctgccgatgctcccggctgaataaacctcttccttctttagctccgtgtctgcggagttttgtctgtggcttgtcctgctacatcaccagggctggagtgcagtggcatgatctcagctcgctgcaacttccgcctctcgggtgcaagcgattctcctgcctcagcctcccaagtagctgggattacaggtggccaccactaagcccagataattttttgtatttttagtagagatggggtttcaccatgttggccaggctggtcttgaactcctgaccttgtgatttgcccatctcggccttccaaagtgctgggattatatatattcctgtaggagatagaagcttcaaaaaataaaaacctacagccaagccaataaaatagagcacatatctcaccacaactgcaaagacaactatgctgacattactacttttagttggtgttgtgctggaggttaaaatccattcagtaaagcaagaaaatatatatttatataacctaatgactgaaagggaaaaataagtcattacttacagattatctcactgcctatgtggaaagggaaaagagtcatattaagtactttggactgaacaatgaccccaaaattcatttgttgaagccccaaaccccaatgtgagtgtatgtcaaaataggatctttagggagtatcattaaatgaggtcgagggacacaaggggctgtggggagggagagcgagagtgagagcacgacccgtttcttggtctccatcatgtgaagacatgaggaattaggcatttacatgccaggaagagagctctcaccagaagtgggccatgctggcactctgatctcagattttcagcctccagaaacatgcgaatataaatgttaaaaacaagtagtttagatagttcctcttcaaagggtttcattttgttacaaagtgttcctctgcaagaggtctttacttccttgtactgtctgtcctgaagtcttatttccctgttgcttaaattaaccttgcccaccagtctatcagcccctcccatcctgctgtgctcaggcatgcccaccaagaagtcaccccctccctgctgtaacagccttccctgccacaactgttcttccctgtactcttcaaattagctaactgcattcagtttagactgtgtggttcaaccccaaccaataggggaatgacacatcaactaaggccaagtgcattagggattaaaaacccctgctgtcttttgtctgatgagctcttgccattgctccatccacgagacacatgcttctgtagaagtaaatttgactttctgagaaaatttatgttcgactgctatttcttttgcagcacaaatagtatgtttctaacaatttggtggcctgtacaaggaccccattctcctcccagagggttttccatcctctcctgtgaggacacatgccccactgcctcattgcagtagcctcaggggtaaggaatggagacccccctagtgtgatgaataaacccggactctcagcaacatgggaagaaaagacctacaaataccgtggtgaccagataactctgtccacagaccaaggtaagaaatgctgcaggagctggcaaagtatttcctaggtggtcatgaccaagctaagaaaagccacaggggcagtgaaatattccttggtgaggacacaccaaggcatgaaaaactgcgggggtggtgaagtattccttggaaggggtatcttggaagttaatagtgtatgaataagatgcacaattgcatgtgaaatgagtgttaagtctagatctgcagttctgtggtcacctcatatggcttagggtgacccacctgtaaaggagtccaggatgggggtttataccaacccaccaatgccaagagggacctaacatggctagagaaggatgaagtgaaagaagaggcaaaaaattcccagtaggggggattgagcctcacaggaacctccagtagcaaggaaggcaaaaaatttccattaggggaaattgagcctcaccccatattgcaagaaatttccagtaggggaaattgagacttaccccaaaaggcaagaaatctccagtaggggagattgagcctcaccctaaaaccatcaagatgggaaataccccaaacaaggtaagaaaaaggataaagctagcaacaataatattcccctgatagtcccctaggcctaatgttaaaatattagaagaataatgaaaagaccttagagaaatgataattaaaagaattagagaatctgtaccctgtatccaaaacattacaaaagctttcaatacacaacaagaaaaaaataaatgacctataaaattctgaaaaaaactcaaagagcaaatggagaaatatgcaaatctagaatagaagaccccctcagatgagggatgttaaagcttcattttgttactaatcgttggccagatattaacaaaatattacaaaaaatagagaaccagaaatacagacctatagaagagtttctttaaaaagcccaaaaaaacaccagtgcagtggctcatgcctgaaatctcagcactttgggaggccaaggcaggcagatcacccgaggtcaggagttcaagaccagcctaaccaaaatggagaaaccccatctctactaaagttacaaaattacccaggcatggtggcacttgcttgtaatcccaactacttgggaggctgaggcaggagaatcacttgaacccaggaggcagaagttgcaggagctgagatcacaccactgcactccagcccaggcaacgagtgaaactctgtctcaaaaaaaaaaaaatcccaaacagtatatgtaagaagagaaaaagaaaaacaaaagcaaaaggcaaaaatcttgctgtccaccatacaacaaagtaccaagggagccagacatataaagaacctagaccaccactgtccaggtgatataaaatgtatgaaagagtaaagccaggagactcaaaggaagaaaaaaaaaagacagaaaaattgtttcaaatgtgaaaaaataggtcactttaaaagacaatgtcccaagtgagaaagaggaagagactgagtgtgagggagagaatgctgagaccagatcggtcagggagaccctaacccagtagcgctagaagaattgaagacacacacacagaaatatagaggtgtgaagtgggaaatcaggggtctcacagccttcagagctgagagccccaaacagagatttacccacgtatttattaacagcaaaccagtcattagcattgtttctatagatgttaaattaactaaaagtatcccttatgggaaatgaagggatgggccaaattaaaggaataggttgggctagttaactgcagcagaagcatgtccttaaggcacagatcactcatgatattgtttgtggcttaagaatgcctttaagcagttttccaccctgggcgggtcaggtattccttgccctcattccggtaaacccccaaccttccagagcgggcattggggccattatgaacatgttactgtgctgcagagattttgtttatagccagttttggagccagtttatggccagattttgggaggcctgctcccaacatgtcccccttctttgatttgcagattgataaaagcaaaggagctttgtcatggtgagctacttctcataggagtcaggatctgcatctgaagactatacaaagataaataacatggattaaaagcacaatcatcattgaaattacagagcttccaagtgtttttatccattttaatgggttactagctgctaatttgtctgcagctcctttaagcaccccagttcctggcattaaggtcaggtgtgcctgggatgttttaaaatctgttcttttaattttgcaatatccaaaaacaagtctgtagagtgtccttttagatacttttttattctttccaaaattgtgatcttattaagagctattaatagtttccacaaatccttaatgtttagctcctacaatgagccatatcatttgaggttgaagtgccactatactgctatggttccagataataggaactcttgttgtacttcttatcatttctaccatctgaccattttgttcagaccagctgaacatagtgtggctggggcatgcagactgagaggtgcaattcaagctaaacatccccttaggggaccaatcaataaagattccataggaatcattgtgtagcacctctacctgttctgcaatgcaattttcctaaacaagcacattcattttttctaactgggtccaatcctgtttacaaataggtttttgagggtggtatgcctcaattataggagcagatttattatggtaaatactgagatcagaaagcatgtgtaactgggtcatagagtgattgcatccaggcattattgccagccaagattgatcaatatgcccaataagtataattgttctctgtgtcagctcttattgaaggaatactcacagcagtggtgataaccactatgatagctaccattaaattattcattgtgactggttgtcccactttcctcagtttttcttccaccatctgtgacagcttcttgatctgtccccaggtgggtggctgtgttcaacgggtgttactcgtgacagttggggtcctcctcagcatcagtcttgacatggctgcaactggggggtccttgggatcctcccggagtctcttcctcggcatctggctcatgataaggtttcaggtgtcttgatggtatccaaattggctgttgattttggcctggagaaacacaagcataacctctaccctaagttattattttacctatttcccatctttttattattggatctctccaccaaatcagttgttctgtttctgtctttgcagctggtttctgtagatgctgttcagctgctgataacatctggcctttgggcaggttcaaaaaatttaatgttaataatgttagattcagttgtatctgtgtggttccatattctccgtctccccttttctgcttttgcaactgctgttttagggagagattcattctttccactatggcttgtctttgagaattgtatgggataccagtaatgtgtttaatactccacatagagaaaaatgtagctagagattggctagtatatcctggggcattatctgttttaatagaagctggaatgcccatcaccacaaaacactgcaaaagatgatgtttcagacaggccaaacactctcctgattagcatgtagcccatataaagtgagaaaaggtgtccacacatacacatatataagctagtctcccaaacgaaggaacatgtgtgacatccatttgccaaaaagagttaggttccaatcctcaaggaataactcctcctgtaaaagatgaggaatgtaccatttggcaagttgggcatcactggataatatttttagcttctttcctggtaattctgtatctgcgtttgagaccagaggcattaacatgggttaaattgtgaaaatgtctaacattagatactgcattagcatctaggcaatcaggcttttgattcccttcagtcaaaggtcctggaagaggtgtatgagccctaatgtgactgatgtaaaaagggtgcattctacttctaactgctgtttgcaactgggtaaataaagtcatcagttgttcatctgtatgaaataataactgagcattttcaattaactgtctgcaatgaaccactatgaagaatcagaaatcacattaataggcatatcaaaagcagtcaatacctcaattactgctagaagctccgctttttgagctgaagtatagggcgtctggaaaactttactttttgagacaaaataagaagctttaccattactagacccatctgtaataacattctcagcaccttcaattggtttaaatttagttattttggggagaatccaattagttaatttcaaaaactgaaacagctttgttttaggaaaatgattatcaagaatacccacaaagtcagctaaatgggtttgacaagtaagactatttataaaagcttgctgtatttgtgccttcgtgagagggacaataacttttccaggatcatatccatgtaatttaacaatccaagttctcccaatccctatcataatagcaatttggtctaaataaggagttagagtccatgaattagtatgtagaagaaaaacccactctactaagtcctgttcttggaaaataacaccagtaggtgaatgctgagttgaaaaaattagcaaatctagagtcttctctggatctattctatttatttgagctttatggacttgtttctcaatcagttgtaactgcctcagcctcctttgttaaatgccaagggctagtgagactaggatttcctctaaggatagaaaacagattactcacggcataggtaggaatgcctagagcaggtcgtatccaattaatttcccctagtaattttcaaaagtcatttaatgtttttaattgatccctacatatggttactttctgtggcacaatgatagtgtcatttactaaggtccccaagtaggagtaaggagtagtagtagtctgaattttctcggttgctataattaaaccagtgcaagaaatcgaattttgcaagtgatcataacattggagtaatatttctcaaatggggacagcacaaactatatcatccatataatgaataatgtaacaccaaaaattttttacaagtaggttcaattgcttgcaccacgtacatctggcaaattgttggactgtttaacatgccctgtggcaacactttccaatgataatgcttagcaggctacaggttgtttactgctggaattgtaaatgcaaaccgttcacagtcttgctcagctaaagggacagtaaagaaacattcttttatatctatgactattaaagtccaattttttggaattatagcagaagaaggcaatcctggctgtaatgctcccacaggttgtataactgaattgatagttcttaagtcagttaacattctccatttacctaattttttcttaattaagaaaactgaagcattccaaggggaaaatgttggagctatgtgcccattttctaattgttcagtaactaatttctctaaagcctccagtttctctttacttagcggccattgttctatccgaattggcttatctgttaaccattttaaaggtataggttctggaggcttaacaatggccgccatcaaaaatgacatcccaatctttggcaggaactttgtctttccacttgaagtggttttttcaaaccttgcaaatttttttctagtcccataccagggacataccccatttcatgcatcatatgttgattttgagggctatataattgttctggaattagaacttgtgctccccattgttgtaataaatctcttccccataaatttataggtacataagttataattggttgaatagtcccaggttgtccatcgggcccttcacaatgcaaaatataactactttgatatacttcaggggcattaccaactccaactatgttaaattgagcaggttgaattggccacgtggatggccagtgctggagagaaatgattgaaatgtcatctcctgtgtctaccaaacctttaaatttctttccctgaatagttatttcacaggcaggacatttatcagtaatttgatttacccaataagctgctttgccttgtttatttgtgcttccaaatcctcctgttcacttaatttcacttttccccattcccacatgtggcacaatcaggggctgtggtatgcactctcctggctctgctttccagggaacagaagtagatataacaatttgaatttcccaaatgtaatctgaatcaatgactcctgtatgtatttgtatgccttttaaactttaactaggccttcctaaaagtaatcctattgtcccttctcgcaagggtccacagactcctgttgggaccttttgcaaggcttccccaggcagaaggcttacagcttttgtgcagcataaatctactgcagcactaccagctgtggcaggggacagatattgtacaggggtgagggaacggcctgagttggaaatgccccactttagaatggggcccaggacaggcccctcatggtgtttcctgaaattgggttcccatctttatcaaacttagggtgacactgattagcccaatgttttccttttttatattttggacatatttcaggatcagcagttttctttcttcccctatctggcaggctgactcgctgattttttctacattcttttttagtatgaccatgcttcccacagttaaaacaagctccaggaaatggaatatttcctttatccactctcagtcctgccattgcctgtgccaacaaagtagctttatgcagattacctccgataccatcacaggacttgatataatcaactaaatgtgctttcctgaatttaaaaggaaaaggctcaaatgtagctataatatttccctgttgatctagggggtgtattctaacagggaactgccaagcctctaaatcacccctcgtctagcttgctgaattcctgcctgagctcaaacagtcactggggcaactacttttcacccagtgtcctccggaaaagaaagatctggagggtctttttcttcaaaataataatgacggggtgcagaagggtagagatgaacctctccctcctttgctgctttagctttagctggcaaataaacctgctctgtaacctcttctgttactttgttatactctagttcctcatcatcatcagcgtgaaaaagctccaaggtgaaacgaaccagaccccacacctgtcccattgttaccctgatgcttccaagctccccttcttactcaccatggggattgctttaagagtgctcgggtgtcctccagctagttttccattccaaccatcgctctggtgacacttcaacctggattcaaacccccacgatggacaccacttgccgaaaccagcccagtcagggagaccctaacccagtggtgctagaggaattaaagacacacacacagaaatatagaggtgtgaagtgggaaatcaggggtctcacagccttcagagctgagagccccaaacagagatttacccacgtatttattaacagcaaaccagtcattagcattatctctatacatgttaaattaactaaaagtatcccttatgggaaatgaagagatgggctgaattaaaggaataggttgggctagttaactgcagcagaagcatgtccttaaggcacagatcgctcatgctattgtttgtggcttaagaatgcctttaagccattttccgccctgagcaggccaggtgttccttgtcctcattccggtaaacccacaaccttccagcgtgggcattagggccattatgaacatgttacagtgctgcagaggttttgtttatggccagttttagggccagtttatggccacattttgaggggcctgctcccaacagagaagaaacaggggatgacagagagagagaaaaaaagagagattgcaaatgagatagagacttaaaaaaaaaccctatgagtctaaaaataaaaaatgtagagagaaacaaaaaaattagagacagagatagaaggagagaatgagtgagaaagagactaaacgagacagagatcagagagggacacagaaagtgagactaaggagagaaatagtgtagaagagagaggaggccaggagcagtggctcacacctgtaatcccagcactttgggaggctgaggcaggtggatcacgaggtcaagagatcgagactatcctggccaacatggtgaaaccctgtctctactaaaaatacaaaaaattatctgggcatggtggcaagcgcctataatcccagctacctgggaggcagaggcaggagaatcgcttgaacccaggaggcagaggttgcagcaagctgagatcacaccattacactccagcctgggcagaaagagcgaaattccatctcaaaaaaaaaaaattgcaaaaataaaaaaagaggaaaagacaggagacaaagagacaaaaagtgagtgagcaggtgaggagagagattgagaactatgagagacagcaactagtagaaaaaggaggcaggagactgcttgggtgccacagcacccacaccatcctcttgcccctgtcatttggacccaatagctgacccttgatagaggagagcagacctcgcagcagcctgagcctgggcagccgtgcctccaccatctccccactcagcagcctaagtcccaagctatatgtgatgcaactctcagagtctatggatgtgtaaaaatgtatactctggcaaacaacttacagatagttacctaatatatacatacatacatacatacatacatacatatatgtgtgtgtgtgtgtgtgtgtgtgtgtgtgtatatatatacactaataagcaaactctaagaaagtcaccccttggaggaagggagccaggattaaggccgttctaaagtgtccaaactgattacaccaaaatggccccaaattggttgcctaaagtacctactagtaatgtaaatcaccttactcactaggtagaggctattctcttttcaagtgcaacagccagtaatgtagttaaagcattaattgaaaacattatacccaagtttagattaatagaaaatattgattcagaaaataagacttatttcactgcacatgccgttaaaaaattagcccaagtactaatcataacataaaaataccatacccccggcacccaccttcatcaggaagaatataaaaaaaacaaactctaagaattcatctaaccgaattagttttagagattcggttaccatagactaaatgcctccccattgccttgttaagagtcaggaatgcccctcggaaagatggtggcttatccccttatgaaatggtatatgggttgccttatttacactccactgctgacattcctacattcgaaacaaacaaacaaaaaatcagttttgcaaaaactatatacttagtctaccttccactctctcttccctcagaactaaaggccttttagcacaggcaccacccctggatttcccagcacacctgcatcaacctggagatcacgttttcattaagagctagagggaagcaaaactcgaaccggctttgggaaggacccttcctagtgcttctaaccaccaagaccacagttgaaacagcaaagaggatggacccatcacacccgggtcaaaaaagcaccaccccctccagaatcatggacagttattccagggccaactccaaacaagctaaagctaaaacgggtttaatcctcttatgttgcaactctttcttttccccttctattactagtcctctcatgattaatgtaactaagtcaagttcaccccaaactattacttttaatgcttgccttttgatgctctgtggagatttaccaagccagaggtaacactccacttcagaaaagtatctttgtccttcctagctctcctcagactaaaaatctgttaactaggataagttagtttaaaaatagcttgacaaagattccagtataaactggaatcttgtcctcctagggcagagcttctctgccaaagttggtccaatgctctataaaatactaaagaacaaggatagattgctctaactagtacttgcagtttcttaaaaccttatatttattttactaaagcacttacccctcccaattgtcagctgaaccatcataatccagtacagattaccatctctgctccccagagttcttccccttcattaagctacgtctatagtataagagcagaagtatcagggaaggacgctttaggatcctttaaaatgcacttcattgtttccccacctcctgcacccccttctccctctccaaagttctctgctaatcaaatcttttctcattatatacccaatgataaaaccaaagtacctgttacagaggttaaaaatttaaaacaaactatagcaattaaacaggatatcaagacacaaatgcttggctggaatggattaaatattctgttcacatgctaaacaaaagcgactgttactcttgtgtgacaggcaagccagagacccaaattgtcccctttccacttgggtggtcctctcatggactgggcataagctgtatggcagctgggcataaacagtatggtagctgtatgctagcccccttccaaaaccccacagcctggggcgatgagtcatgcgaaactctttcactgctgttccctgaggtcaagagccctaagggtcagcccctgagggccatctggcctccagtccctaatattaacttcacctcgtgcctttcactgcagggggaaaagttagcattccttggagacttaacagggtgcagtgaaaccaagccttttcaagagcttaccaatcagtctgccttgttcatccccaagcagatgtgtagtggtattgcgagggactattgctgggtactctgccaagccattagggtggcacttatgctctaggccttttccaggtgaaaaggccatccttttccccctctcatttcatcaaccaagaaagataatggcaaaagaccacaaaaacaaaaaatgcccttcgtgtgtcctttaatcctcatgtttatataaatactattgaagttccacaaagagtaccaaataaatttaaggcccataaccaaatagctgcaggatttgagtctatattgttctgatagttgactataaataaaaatgtaagttaaatgaattacatctattacaaccagcaacaatttaattataccaaagatgctattaaaaaaataggtcaacaattaaggctcatcagtcaaatgacttaagaaaataaaatagcattaaatataatactagcaaaaaaaaagaggtagaatttgtgtcataattaaaactaaatgttgtacttttatccctaatagcactgccaccaatgaatcataacaaaagtactacaaggcattactactttgtccaataagctagctaaaatttctaaaataaataatcccttcactaatttattgaaaaatggtttagcaagttaaaaggacttacgtcctaaatcctcacttcccttgctattatactaaatgtgatcattcttgttaagtgttgtattatcccttgcatccataagctaatttagaggcttataaaaacagctctcattaaaaccttccccaattctcccctaccctattcagacaaacttttccttctagataataattttttaaaaattcgacaaattcaagccacgttaaataaatttaaagaaggaagtgtataaattcaagaggggtcaaattgttaaaaacaagtagttcaaacagttcctcttcaaagagtttcactttgttacaaacaaggtattcttctccatgaggtcttcacttccttgtactgtctctcctgaagtcttattccctggtctaaataattcttgcctgccaatctatcaacccctcctgccctgctgtgctcagacatgcccgccaggaaaccaccccctccctgctgtaacagctttacccgcagaaactgttcttccctgcgctcttctaattagctaattacatttagcttagactgtgcggccgaccccaaccaataggggaatgaaacagcaactaaggccaacagggttagggattaaaaaccctctccattaaaaatgctctccattgtgtgatgtgctctcgccattgctccacccacaagatacactcttctatacaagtaaatttgcctagctgagaaaacttatattcaaatgctatttcttttgtggcactaaaaatttgttccaacaatagatttctgtggttttaacctcacttatttaaaattaaatggatttgtaagccatttggtctgtggtattttgttatggtggcctgagctaaggcagattttgtactgagaagtagaggtactgcaattaaaaacaaacaaacaaacaaaaaactaaaaacgtgaagcagctttgaaactgacaaatgagtagaagctcgaaaagttctgatgtgcaagctggaaataaggttgataagggtaattctggtgaggtgtcactggggaatgaggaacatgctattggaaaataaagaaaagacaacccttgatataaagtggtgaagaacttggcagaactgtattctagcattttgtggaaggtagagcttcagagagataaaattgagtatttatcactaagatctgtaattaaagtgttaaaggacacaggaagcttcattcttcctgactgcttacaggaaaatgcaaaagaggagacttgaattgcagaataaattgttaaggaacaagaaaccagaacttggagatttggaaaattctcagcctattcatactacaaaaattagaaaacttgtactgaagagaatcctcaaagtgtggctgaaaaatcatctcataaagagatcatgagtgggattcatggactatatcagccatcttaagagaaatgaggagagagactggattacactagaagagacactgccacttacattgtgccatgtaaaatggacagagaaggcagaacagaacaggcaaggctgtcacacttcttagattttacaagaagcggtcacagaaataatcagctttgaaagtgcactggcagtaaaagatggtttcattcctgccatgatctgcaggatccctgggaacagagaagactcttggaggagcatcttttaacaacccaactctggggcctacattatcttggcttctggtaaattttgacatgaatgtgccactggcagccactaaccaacaggggctggggtcaatctgcatgatttatctcacacagaacttgttaatgctatgatcttaggaatctaatcagcaaggtgaggcagcctgcagtactgacctcaccatccatgacccttcttcacagataccaagactcaggcaaccatgaagttgtattcagaagctgtaggtttaatttcagactcttgggatggcatctaaggccagtccatcagccattacaaccctcacaaggcatttaggacaaatctgataatcttctggtgtcactgccaataattaaagatggcaaccgatgagctaaatggtaacactcatacccttatattcatagggtttctccccagtgtgaattcttttttttgaaatgaagtctcactctgttgtccaggctggagtgcagtggctcaatcgatctcggctcactgcaacctctgcctccaaggttcaagggattctcctgcctcagcgtcctgagtagctgggactacaggtgcatgccaccatgcctggcaaattttttgtacttttagtagagatggggtttcaccgtgttagccaggatggtctcagatctcctgacctcatgatccacccaccttggcctcccaaagtgctgggattacaggcatgagccactgtgcccagccatgattttatgtctacctaggtgtgaggaaacaataaatgctttcccatattctttacatatgaagggtttctctccagtatgagtttgcaggtgaatattaagggatgaggaaaatataaatgctttcccacatatcttgcatacaaagggcttttctccactatgagttttcaaatgttaagtacgatgggaagaagtaatgaaggtttttccacattcaacacattcataaggcttctctcccatctgaattattgtatgttgagtaaggcctgaggatctagtgaaggcttttccacatttgttacactgatagggtttctctccactgtgacttcgtaagtgtatagcaaggcccgtgtactgagtgaaggctttcccacattccttacattcatagggttttaccccagtgtgagttcttacatgttcagtaagttgaattgatctagtgaaggctttcccacagtctgtatatttgtgtggtttttactccagttggagtttgaatgtgatcattaagatatgaggaatttctaacggaaattccacattctttacaatcaaaggacttctcctctttatgagttttcacatgtgcagaaagttgagaaaaattagtgaaggatttcccatatttcttagtctttttgaatttctttccagtatgagctgttacacactgctttaggtgtgaggagggtgtgatggttctcccacattcctgaaattcagagtttctcaccagcgtgaattcccatgtgattatcaaggcttgcaaaacacttaaagccttttccacattccttacatttgtacggttgtcttgcattgagaacttcaagatgttcagcaaggcctggagttagggtgaagacttttccacatggattaaatttagaaagttcctgtccaatagaggcttctttgtgcacactaagggtgtcttttccataacaattaccctcaaaagtgttccctccattctgagctctcatgtgtgtcttaaggaaaaacagctccctgaagacctcttcacaattcttacagagtttccatccactgtagcttcttgtctgctgatgaggggataaaggatttaaaacattttccaacatattaagagatttcacccatttgaacacagaaacattattttgatgacaattattattttacttttcaatgattaaattttttttgagacaaagtcttgttccatcttccaggctggaatgcagtggcacaatctgggctaactgaaacctccacctcccaggctcaagtgatcctcatgcctcagtctcccaagtagctgggaatacaggtgctgctaatgcacccggctaatctgtaccaagtcagccacaaacgccaggccatgttctgagctgattcataagggcagtccaaacccaggaataagatctcagagaagcacacaggttacctcgtagaccttttcagttgatgttggataagcctccacccacccagagtaagtacacacaagaaccagcaaataattgttacctccacatttcggcatttctgtgaaatccacctgaagatcctcaaaaggagccgtacataagcttgtatgccgggtggaacagtgaggccttgcctcgcattgtgctgtcggcaagtaatgcaccattgtgctactgctttgcaagggctggcaagtgtgagatgtagaagtaccggcctaacaatttttcaagtgactcttgacctagatgagtggtttcgtgcatggccaatacgattgtggctcccattaactgcagcacagctaccctcccatctggcagtctgttccatcctccttttattacttgccccccttctgcatggaagaagtctttttcttccttagaataggtagtaccaggtcaggtgtttgagggagtaagggggctgctaccgatgcccggtaaggggtagatgctgcttttcgagtttctgaatcagctcgagagtttcccaaggccactgaggtggaagctcactggtgtcccctgcagtgcatgactgccaccttctgaggtttccacactgcctctaataattgtagaatatcttgttgatattttatgtcctttcccccagagtttaacaggcccttttccttatataatgctccacactccatgcacttggagggttagaaatgcatatcgagagtcagtgtagatgtttacagtcttaccttcactgagttctagagcccgagttaaagaatgagctcagccttctgggctgaaacaccctgtggcaacggtttggcttcaatgacagcatccaaagttaccaccgcatatcctgcacatctttctccttgtgggttgatgaagctgctcccatccatgtataaatcccagtctactgatgcccatggctggtctcaaaggtcaggtctgctagaataaactgagtccaacacctctacacagttacgcttgactgggctctctgatactggaagcagggtggcgggacttagggtgttacagatttcagtggttatgtggggattttcacatagcaagctttggtacttggttaatctagcatttgttagccaatgatgtcctttggtattcatcaaggttaccacagtatgggggacatttatattcaggttttgcccaagggttagtttatctgcttcttgtgctaacagggctgttgctgccagggcccttagacatggtggccagcctttggaaaccccatctagttgttttgagagataggccactggccttggccagggccccacagactgggttaaaaccccaactgccattttttctctttctgacacatagagagtaaagggctttgtgaaatctggtagtcctagggctggagccgacgtaagtttttcctttaacttacaaaaggcttgctgttgtagaggcccccgttcaaaagacacctggtcgcccccctttgtaaccctgtacaaaggtttggctagtactgcaaagtttggaattcataatctacaaaaccccacagctcctaggaattcccttacttgccttctggttttaggttctggtaggttgcagatgacctgctttctttctgccccagggtgtgctcccctttccgaatagtgaatcccaggtagcgtacgtgctgtctgcaggtcttagctttcttcttggacaccttatatccacagtcttccaggtgccaaagcagggcatccgtcccttttgtgcacccaactgctgtggagtgtcccagcagaacgtcgtccatgtacaggagcaagacgcagcctaggtcttcagcaggaagcttttgcaggtctcgagccagggcctccctgaagatagtaggggagttcttgaacccttggggaagccaggtccatgtgtactgagtagtgacacctgaccccagatcttcccattgaaaggcaaacagcttctggctctcaggagctagtctgatgctaaagaaggtgtcttttaagtccagacaggtaaaccagctgtcctcagctggcagcagctctaacaatgtgtaagggttaggaactgttggtgcagagtcactgtagcttggttgaccaagcgcaagtcctgtgctggccggtagtccttggtccctggcttagggacaggcagcagggtggtgctccgtggagactggcaaggaactataactccacaggctttcacgcacatgagatgaacctggattccttcaagagcttctctgggaaccggatactgcttttatctaactggttgggccccaggcttaacttctatgagtatgggggtttggttgactgccagttccagaggattatcttctgcctatacttgaggccattgtttagctagagctggttttatctcttggcctggctctgttagaaaaagtctccattattcttcctgaggaactgtaagggctgtgataactcctgttcctggtaattttagatgtaaagagctctgttttgtaaaggagatggtggctctcagcttgctaagcaagtctcttcccagcaagggcaagggacagtcaggcatgtacaagaactggtgaactatttcatgtccccccaccgaggatgtctgtggtagacagaaagcctgcttagtggaaactcctgttgctctgattatatcagtggttttcttggataagggggtgaccagggtggtcactactgaatgttcagcaccagtatcgaccaaaaacttaatgtccttgcccccaattgtaatcctgaccgtgggctccttgggggcgcttgagcctggttgccttcactctggtggtccttcagccagattgaacaaagctccctcatctttatctgagatcttttgttccgaatcaccttgcttttccttcagttagggacacttatctttccaatgtcctatttccttacaataggctcattggttatgttgcaagcatgggcaattagactgggtattcttcccggaacccccctttccctctccttttgggggaattcccctaatggccatggccagtaagttggtgtttcgcttggcctggcgttcaccttccttacggctttctctgcagcttgttgcatctctgttcacaaacacttgattgactatttccagtaactgtgaggtattcatacccacaaacccagcctgtttctgcaattttctcctggtatcttctgcgctttgactaactaaggccatgttaatcatgcgctgattttcagggctatctggatcaaaaggagtgtacataaggtaagtctcacacagtctttcatagaattgcgctggactctcctcttttccttggatgacctcagagaccatatttacatttgtagcctcttgagcccctttctttagaccttctattaatgcctcacagtaccatgtctggtcccttgtttgggtcccattgggggtctgttcctggcagctgaattcttatatattactgggggttttggtaatctgctgggacgtactcctctagccacttagttgctgcctggagcacccttcgctgttcgtctgtattaaagaggtacatgagtagctggtggcaatcagcccaagtaggattatgagtctgcataatagtttggagcaagtcaattaaagcttgaggctttttggtgtaagatggagtattatttttccaattgaggaggtcaacagaggtgaaaggttgacacacaaaggcatgcctttccaccacgtctccatcctcatctaccccagtatatcgctgctctctcaggggtgtttggattccagtcttgggctgtaagcgagctgccaaaggaggagtttctcccacagcttcacttcctcttttgtccactctgggtggtctaggagtgtggctatctggcagaggtataggtgctgtgggctcaggagtggggaccccttcctctcgataaggagggggtactgctggtaccaattcctgccatgattcttctggtgttgggtctgacaggacttttggtgctgatttcccttggtgtgtggagcaagaaccttccttaactgtccctttcctactagtactgctgctgcctgtcatcttaaccactgtgggggatccaaaactagctttaaccaagaatctatatacaggaaatgatctgggtgcctggcttatgggttaccctgtgccataccttcgagacaagggacctgtccaggcttccgatggccaatccacctctaatgcaggccagtctatctcacacaaagttctaagttttcctgctgtcataataactccatagtctcccttaaatccctttttgaaatttttcaacatattcctagtggggtgggcttactttgtgcctgacccatgtttccttgagacaaaacaccacactcaaaccacaagcacaccacaaaataaagaacgagtaaagaggacacacacacacttttatagtttatgccaaaccagaatcagaacaaaatcagagtatcagggaatccaagccaggtcaaaaccaaaaccaaagtatcaagcaatcccagtcaagtcaaaaacaaaaaccaaagtgccagtacaggcatgtcatgggtgatcaggccacgcttccactcaaatggagtgggcaagttccaaagaccagtcttaccaagtttcagatgtccggactccaagtgccagttccttcccggtgttcagccactgtgttgatcctccacgggggcctgccacgcactgctccagcgaggtgttccaccggggcaactgactacctgggaatgctctcaggatccgagtcgctcaagctggccagagtcccccagagggatgctccacaggggaggcctaagccacctaaggggctgcctcaaccttccattaatcacctcgcttcccagccagggaatcaagaaagtgtagcaggatgagccacagacaagaacccctcagacaccgaattgtagaaggaaagggctttattcagctgggagcataggcagactcacatctccaaaaacagagctccctgagcgagcaatttctgtcccttttaagggcttacaactctaagggggtcagtgtgagagggttgcgatcgattgatcaagcagggggtacatgactagtggctgcatgcacctgcaccggtaattagaatggaacagaacagtacatggtttttcacagtccttttccatacaatgtctgtaatctatagatagcataaccaattagttcaggggtctgtctttaacaactaggcccagggtttgacgccgggatgtctgcctgtgggtttcatttctgccttttagtttttacttctttttttctttggaggcagaaattgggcataagacaatatgagaggtggtctcctcccttactttgaccaacatctccccaacccatacccctaagcccctggtaactaccattctgtctctccttctatgaatccaactttttaaattatacatacaagggagatcatctggtatttgttttcccatacctggcttatttcacttaacatattgtcctccacatccatccatgatgttgcaaatgacaatgtttccttttaaaacatacaccacttttgaatgtgttttattcagtctacaaagtcacctatgagacattcagtggggtcacagaaggaaagtgctttgcaagccaggcgaggtgcctcatatttttaatcccagcactttgggaagccgaggtgggtggatcacctgaggttgggagttcaagagcagcctggccaacatggtgaaactccatctctactaaaaatacaaatattagctgggcatggtggtgcacacctgtaatcccagctacttgggaggctgaggcaggagaatcggttgaaccctggtgacagagggtgcagtgagctgagattgtgccattgcactccagcctgggcgacagagcaaaactccgtctcaaaaaacaaaacaaaacaaaaaacaaagcaaagcgccctgcatcaagttcaggctgctctataacattctcaagcacttcgtccaaatgatctagtagatccaatcatactcaatgcctccatagcattctctggcaagcaccaataggagacgcgcagcacagtagtgtggagcaaatccatgccatcttctgcaggaaactaccctctttttgagaaacaccttggctctggtactaggtagaaacaactgaccggtgatttttttttttttttttttttttgagacggagtctcgctctgtcacctaggctggagtgcagtggcgtgatctcggctcactgcaacctccgtctcctgggttgaagtgattctcctgcctcagcccttctgagtagctgggattacaggcgcacgcccccacgcctgactaattttttttttttttgtatttttagtagagacagggtttcaccacattggtcaggctggtctcaaactcctgacctcatgatccacccgccccagcctcccaaagtgttgggattacaggcgtgagccaccgtgcctggcctaacacgtgatcttaagattatgttagtgaagttgatccatatcactgtatctacctttattacttcatttgctgtagagcattccagtagtataattatgccacaatttacccattctgttgatctcatttgagtaattcccaattgaggattacatcaaataatgctggtgaaatgtctttaatgttatcttgatgcacactggagccattactcttatgttagagcacatgtacgtgtacaaatttagtagatgttgccaatagtttttgaaattttctctaatactctctacaaccagcagaatacgcacatcctcatcagctttatcttcagaacaaaccatttttttctctgtgtccagctagctcactgggacccctaagtgacaaatacagatggtaatgtatttctttttttttttttttttttgagacagagtcttgctctgtcgcccaggctgtagtgcagtggcacgatctcagctcactgcaacctccgcctcctgggttcaagcaattctctgcctcagcctccccagtagctgggattacaggcgcccacaaccatgcccagctaatctttgtatttttagtagacggggtttcaccattgtggccaggctggtcttgaactcctgacctcatgattcaccctcctcggcctcccaaagtgctgggattacaggcgtgagccaccgtgcccggcccaatgtgggtatttttaagcctcatgtttccttcagagctttctggcagcccatgtcagcaagagagtcttctgatttcatttacccatggagtgagtagatgtgtcggtgacataggagtctcacacgggactggtaactctgtacatttcttctgggaaatggagtcctactttgggtaggaagaacccaaagttgaactgaataccacggagagccttgcccctccatatatgaacacatatttgctaagattggtaattaagtgaattttcatgtagaacttattttcaagtgctcagccagccactgattctgattctttcaattaatttcctacttaagaaaattagtttttcatgagtagaataaagtgatgattagacatcattttttctgtagttataatgttgtagattagattcatccctcattttaatccccaaagaaaattctatcaaacctaagaaaaacccttgatgtactcacctctctccgtagatatgtaatcagccaatttatatgatgctttccttaactcctactccctttcctttcaatatggcttatttagacaccatctttttggtctcaccttaaatagaactcacttttcttacattcatctattcccatatatacacatagaaaacaatactgtcctctacttccaaaactctcatcaatttgtaataataagtcaagcgcagtggctcacccttgtaatcccagcactttgggaggctgaggcaggtggatcacctgaggtcaggagttcaagaccagccaggccaacaggatgaaacccccatctctagccaggcgtggtggcgcatgcctgtaatctcagctacttgggaggctgagacatgagacttgcttgaatctgagaggcggaggttgcagtgagcagagatggcacaactgcactccagcctgggcaacagagggagactctgtctcaatttaaaaaaaaaaattgtaatgaaacatttatttgcttggttagacgtctgcccctccactagtttacaagttccctaagagcagcccttggttggattttttttttttcattatgccttaatgaaccattagcattaatcactttataagaaatacaaaaaataaaagaaatatttaaacacaccataagtctacaatcagaaatattaaaatgggtgtctttctgaaataatatgtgactcttcaaaaagttgatttgacagagaaaccatagtaactggtctaggttcaaagatactaaaggccataaactttaaatagatcttaggtcccaagggcctattttggaaccatgtagagaattttgtttttacaaagtagatactagatgagtcgttcttttttttttttttttttttttttttgagacacagtctccttctgccacccaggctggaatgcagtggcgcgatctcggctcactgcaacctccacctcccgagttcatgtgattctcccgtctcagctggtgggatcaccggtgctggctttatttatttatttatagtagagatggggtttcgccatgttggccaggctggtctcgaactcctggcctcaagtgagccacccgcctcggccttccaaagtgctgggattacaggtgtgagccactgtgcccagcctaaatgactttttttaaatttttcttggttgaaatacaaatactgtggttttagtagaccagtatcctttatctttagaaaatgcattaccaactacctgaaagtcaagtatcaatttcctgcaattttcaacttaccctcaaatacttcaccataaaaggtattttagttttctagggagagggcgaatggtaaatttgattcctaatactagtgcaacaaaatctatatcctttcctcctgggtgcccatttttgtctttttgtttaagaggcaaggtcttgctctgtagcccaggctggagaacaatggcgtgatcatagctcactgtagtctggaactctctgtctcaagtgattctcccgcctcagccttccgagtagctggcacacaccaccatctctggctgatttttaattttttttttttttttttgtaaagacggggtctcgctatgttgcccagattggtcttgtaccccgggtacgagaccccgtaccccgggtgggcccctggtttgttcgtttgcttgggttttttgttgttgttgtttttgagacagagtctcggtctgtcaccccagctggagtgcagtggcacgatctcagctcactaacttcctcctcctggattcaagtgattctcctgcctaagcctcccaagtaattgggattacagacgtgcgccaccacgcctagctaatttttttgtacttttagtagagacgaggttttgccatgttggccaggctggtctcaaactcctgacctcaggtgatttgcctgcctcggtctccctaagtgctgggattacaggcgtgagccaccgcacctggccagcgcctgtttttaaaatctgtggggaggtccaggcctacgaagttcagatcaaaatagcttagcattcttatttttcttcagtagaaagacctgtttgtggtctacataattttatatttccgtagagaaatatgcactccctagatacttattaaagtgtctttataacagaatgtatggcgtcaaaaatacgtttatgacgcataaacaaaggaacattctcagttgaaacattcgttcgtataacaagatgcccccttgaaccatccctcacccagtgctcaccggaatgcgcgggaatcgcagggtctgtaaggcaggacgacgctgggggacaagttaacgtggctcaagtggaggaaattcttttcctcatagaaaaaactcacaatggtctttttggaggcttttgaagggagctccatgggtgagggcggcaattatcgaccccgactttcgcgaggactgacagcccgagcggcctcgcagacctacctgacgcgagcacagcaggccaagtatctctaagaaggcccctcggcagcttcggataaacttcaactctcaccacccgttccactaccagtacacttgctccctccgaaatcaaggacaaccatgggtaaacctcgctcaggctcgcggagccagtaccggaaaagagggtggcgcctcgcttgcgtcacttccgcttacagcctccagccaggagtggctctgctgctcgtgcttcagccttgctggaagacattacgtcgagaaattctagtttcctcccgcgtgggtgcagctgagacttgctgtggactcacagaggaagctggagtccccaggttcagagaacaaggttgaagttagtcaggcctgtggagggagctatgggccaggggcacgggcccacgctagaggaccaggaggaaggtgaggccaggcccagaggatgagcttgaggttagaatcaggcctgtgggccggactacgctgggggaggagccatgattgggggcggagcagaaggtgggtccaagcccagaacaccaggttgagatcagatccagtcctgtggatggtagaagggcagggaggaaggtggggcctggccccaagtaatcggcctgtgtgggcctcccaaagtggtgggattacaggcatgagccaccgcgccctggccccggactctcaattctataccattaatctgtagctctgtccctaagccagtgccacattgttttgattactgcaactttgtagtaagttttgaaatccagaaatgggagtccttcaactgtgttcctctttttcacaattgttttggctatttggtgttttttccatttctgtttgaagtttaggattcacttgtcaatttctgcccagaagccaatgtcaaaaaaataaataaaaataaataaataaataaaaaagcactggaaaaagcaagatcttcattaattttagtcacctgtaccagatttctctttctttctttctttttttttttttttttgagatggagtctcgctctgtcacccaggctggagtgcagtggcacaaacttggatcactgccacccccgccacccaggttcaagcaattctcctgcctcagactctagagtagctgggattacaggctcccaccaccctgcccggctaattttttttttggggtgggggacagagtttcactcttgttgcccagactggagcacaatggcatgatctcagctcactgcaaattccaactcccgggttcaagtgattctcttgccgcagcctcccaagtagcagggattgcaggcacctgccaccacgcccagctaatttttgtatttttagtagagacagggtttcaccaggttggccaggctggtcttgaactcctgacctcagaaaatccacctgcctcagcctcacaaagtgctgcgattaccggtgtgagcctcagatttttctttaggcatggaagtgtaggggtctacattaggagagagttaagagtgtaacagtatcatgggttaagcagagctcaggaggaaaaccaaaaaatattgtatccattttgtaccttaggaaaggccatccatgagcatcactgggtggagatttttgggtaagaggtgtatagtttctagcacaagggtcaaactcaactccgatggaaaattcttcgttggggcagtgtcttctgaggcaatgtcatctcagccagtgaaatttgggggccagagtgatatcatgatgtcatctgggatgtgggactggggaatcctttgttgttgttgttgttgttttgagatggagtctcactctattgcccaggctggagctcagtggtgggatctcagctcactgcaaactctgccttccaggttcaagctattccaatgcctcagcctcccaagtagctgggattagaggcacacactgctatgccaggataatttttgtgtttttagtagaggcagggttttgccatgttggccaggctggtcttgaactcctgtccttaagtgatccaccttccttggcctcccaaagtgcagggattacaggcatgagccatcaagcccagcctgaggaatcattttacgtgagtacccatttgagttaatagggacctcctgagtgtaaaccagtgaaagtacagaaactagtagtaataacaccaacagtaaacagaatggtgtgcaactgtgcctgacagtttttgtttttgggttttttttgtttttgtttttggtggaaatttagctgctttttgtttggagggttttttcgagacagggtctcactgtattacccaggttggagtgcagtcgtgcaatcatagctcactgcacccttgaatccctgggttcaagggatcctccctaagctactgagtagctggggctagaggcgaatgccaccatgtccaactcatttttcaatttttttgtagagatgggtctcattatgttgcttgggctggttttgaactcctggcttcaagcaatcctcctgcctcagcctcccaaagtgctgggattacaggtgtgagccaccgcacccggccaaaattaagtttaaatgggtcctgtggccaggcgcggtggctcacacctgtaatcccagcactttgggaggcgaaggtgggcagatcatgaggtcaggagttcgataccagcctcaccaacatggtgaaacctcgtctttacttaaaaaatacaaaagtgagccaggcgtgttggcacgcggctgtaatcccagctactcaggaggctgaggaaggagaatagcttgaacctgggaggaagaggttgcagtgagccgagatcacaccactgcactctagcctgggcaatagagagaggctctgtctcaaaaaaagatcataataataaaataaaataataaatgggtcccgttatcagatgatcagctggctggcctgtgggacaatctctgcttaatgagtccaaagaaagcatatacactcaatctggattctaatccctgagagatgggggcaaaattaaaaatttgttaagattggttaagatttggggcaaaatataaacttatgtaggggtttatttgttggactgcaatttgaaaaggagttgtttgaggacttcattacatccctcagttaaaatgtctatttggaacctgttagggacacaaaacgtctattgaatgcctttttcaagagcctagcgttctgtattttaagaagtgaaatgtgtgtcttggttactatcagtaatgcctgttactccaaagggaatgtggagtggccttgcagaggctggtattgcggcctcagtatacgtggcaatgtgttgttttgatttatattttcggtatcagtcaggcaagagatttccagactttttttttaccttatggggacaatatttaggtaatggctcagttgtgtataataaacatgatgatgggatcatatgtttgaccagggcatccagtgccaaaacagttgccaaaagtacggccaagcaaattgtttcttggatcctgtcctttaaaaaaagaaaattagccgggcgtggcggctcacgcctgtaatcccagcactttgggaggccgaggcgggtggatcatctgaggtcaggagttcaagaccagcctggccaacatggtgaaactctgtctctactaaaaatataaacattagctgggcgtggtggtaggcgcctgtaatcccagctactcagaaggctgagacaggagaatcgttttaacctgggaggcagaggttgcagtgaaccgagatagtgccactgcactccagactaggtgactcccatatatatatatgggagtttattaagtattaactcacaggatcacaaggtcccacaataggctgtctgcaggctgaggagcgaggagagccagtctgagttccaaaactgaagaacttgaagtctgatgttcgagggcaggaagcatcccgcatgggagaaagaggtaggctgggaggctaagccagtttctctcttcacatttttatgtctgcttatattctagcatctctggcagctgattagattgtgaccccccagattaggggtgggtctgcctttcccagcccattgactcaaatattaatctcctttggcaataccctcacagacacacccgggatcaatactttgtatccttaaatccaatcaagttgacactcagcattaaccatcacaccaatctacaagagcaaattatttatctgttgttgaatgaatagaatcagtaatctaaataatattggaaattgagtatggagaccctgatggatgggaccacaacattaagtcaataattagtccatcacgaagggccatttatcacttttattatttgttttgtttattttctagagacagggtctcactctgtttcccaggctagagtgaagtggcccagtgacagctacctgcagcctcaacctcctggactcaagtgaacctcccacctcagcctcccaagtagctgggactacaggcacacattaccatgctcagctaatttattctttttgtagagatggggtctcactatgatgctcatcttcccaccttggcctcccaaatctctgggattataggcataagccaccacagttcacccttgtttttaaatcagtaactaatctagggatagaattctgtttactagccttgatgtttctttagtacttacagtttcaagttactcatttccaccaccttggatttacagctgcctagagcagccagaagtctttttttctcccctcaaacctccccattttaggctttgagttgcctaaagccacagttctttgtgtttgttttggttggtttgagacagatccttgttctgtcacccaggctggaatgcagtggcacaatctcagctcactgcaacctccatctcccagaaagccacagttcttaaattccatctctggttgataagaggaaatgagggagcagtaaaggtccgatgcctataggcagtagcctcaagacaattggtccttttcttccccccaattttttattttacataaaatctttacaatggcttgtatttctaagtggctaaaaaaaattttttttttttggccaggcacagtggctcatgcctgtaatcccagcactttgggaggccaaggctggtggagcacttgaggtcaggaacttgagaccagcctaatcaacatggtgaaaccccctctctactaaatatataaaaattatccaggcatggtggcacatgcctgtaatcccacttactcggaaggctgaggcactagaatagcttgaattgggaggtggaggttgcagtgagccaagattgcaccatagcactccagcctgtgcaacaagagtgaaactccatctcaaaaaataacttttttcctcttattttggatgtttacttgacatactggttgcttggtccccactggctcctgttgtaagcagtggactccatttggttccctttggccccatggacaggcagtcacctccctccctctctctggtgtccccattgacctcattagggtcaggtgacaaagaactacataagccagtgaaggcaccaacatagagatcccagaccctggcagtacgtttgcctggaatgggatatgacttcctggggagggggcacccctcctactgaaggaaccctgtggggttttggcacatcaccaccaagagcgagggtctaacagaggccagtcttcaaactcccatgaggggttttgccaaatactgggtatatatatgcatgaagctggggttgcccctttcctgttccagaacttatgacatgaattgcaatcttgaacagcttagccaatttggttctgactcattcattggactaacagtgagtatagttctccctcttgctgtactagggctgggtttttagtctaggccaagtgataccagaacaggaaaaactggtattcttattgcccctttagtgttacttgtaatgtcctctgagctggccacaccatggtcaagccagcatgacattcacccgcccttgtgataatgtactttgtgatattccccaaccttgtgaatgtactttgtaaaattcctccccacccgtgtgacaatacaccctcccagcccttgtgaatgtactttgtgacatccttcccacccttgtgaatgtactttgtaacatcctccccgcccttaagaatgtactttgtaacaaccatcccttgcctgcaaaacaattgctcctaactccacagcctatcccaaacctataagaagcaatgataatcccaccacccttcgctgactcctttctcagactcagcccacttgcagccaagtgaataaacagccttgttactcacactaagcctgcttaggcagtctcttatatggtcgcacataacatttggtcccaaaaacccaggacaagggaactccttcaggagatgtgtcccctgtcctcaagctccctgcatgaggagatccacctatgacctcggggcatcagaccaaccagcccaaggaccatctcaccaatttcaaataaataagtggtttttggcacttgggtcagcagttttttcactcgctacttaacctctctcacctcccttcaatctctctttcaatttcagtttctctcctttcctggtagagacaaaaaggagacacactttatccgtgcattcaaaaactctgacattggtcacagacttgggaagatagtcttcccttggtgtctgatcaccgtggggacgcctgccttgatcattcaccaacattcccttggtggcaggtcaattgcagggatggctgctttggcagctcacccacattacagcctaggactcagtcagggatgcctactggaagactggtagctgcccacctccatttctccgtgtctctaccttcctctttaaacttaccttctccactatgcgcaaccttccatcatccattcttacctcttcccccttagcctgtgttcttaaaaacctaaaacccctttgactaacacctgacataaaagctaaatgtcttattttcttctgtaatattgcttggccccaatacaagctcgacaatagttccaagtggccagagaatggcactttcaatttgtctatcctacaagacctcagtaatttttgtcgaaaattgggcaaatgatctgaggtggcttacgtccaagcattttttacattttgctccctccctagtttctaccaccaatgcaactcatcccagattttccttcttttctctcctgtctgcttcttcggtcttcaccccaagctcagagtcctctgaatcctccttttccagtgacccctctgacctctctcctcccccagctgctcctcgccagggtgaatcaggtcccaattcttccacagcctctgctctcccaccctataacccttctattacctcccctcctcacacccagtctggcttatagtttcattctgtgactagctctcccccacctgcccaacaattttctcttagagaggtggccggagctgaaggcatagagtcagtacatgtgcctttttttctattagacctttcccaaatcagtcagcatttaggctctttctcataggaccccactaaatatatacaggaattccaatatctaactcagtcctacaacttaacctggagtgacttaaatgtcatcctgacctttaccccctccccagacaaacaagaaagagtttattttctagcccagtcctacacagacacccactggcttcatgagccaggcctccaagagggcaccagggctgttgcccgagagtatccccattggcaataccagacagactccccaggtatagctaggcgagattacatggtctcctgcctagtcgaggggctgaaaaaggcagcatacagcgctgttaattatgacaacctaaaggtaactacccaaggtaaagttgaaaacccagcccagttcattgcccgcttagcagctacccttagacactttacagcactagaccaagaggggccagaaggccaccttatccttaatatgcattttatcacccaacctgctcctgacattagaaaaaatctccaaatttggattctggccctcaaaccccacaacaggatttaatcaatctcaccttcaaggtgttcaataacagagaagaactggccaaacagcaacgtatctctgagttacagctacttgcctccactgtaagacaacccacaacatctccagcatacaaaaccttcagaacaaccaagacacagctcccaggggctccttcaaaacctcctggtggaccttgcttcaaatgccaaaagcctggtcactgggcctcggaaagcccgcagcccgggtttcctcctaagccatgccctctctctgtgggcccccactggaagttggactgtccgactcacatcgccaccattcctaaagctcctggagctcgaacccaactttccttggcagactccttcccagatctcctcgacttagtggctgaagactgatgctgcccaatcaccttggaagcccccaagaccatcatggatgctgagctttgggtaactcttacagtggagggtaagtccatcccgtttaattgatatgggggctacccacacaacactactttcttttcaagggcctgtttcccttgcccccgtaactgttgtggttattgatggccaggcttccagaccccttaaaactccccaactcttgtgccaacttggacaacattcttttatgcactcttttttagttatccccacctgcccagttcccttattaggctgagacattttaatcaaattatctgcttccctgactatttctggacctcagtcacacctcattgctgcccttttgccccattcaagacctcttttgaatcctcctttcgtgtcttcctaccttaatcctcaagtgtgggatacttctactccctccttggcgactgatcaggcaccatttaccatcccattaaaacctaatcacccttacctcactcaacaccagtaccccatcccacaataggctttaagaggactaaagcctgttatcactcacctgttacagcatggccttttaaagcctacaaattctccttacaactcccctatcatacgtgtccagaaactggacaaatcttacaggttggttcaggatctttgttttattaaccaaattcatcctgtagtgccaaacacatgtactctcctatactcaatacctccctccacaacttattattccatccttgacctcaaagatgcctcttcactattcctttgcacccctcatcccaatctcctttcactttcacatggactgaccgtgacacccaccaatctcagcaactcacctggactgtactgctgcaaggcttcagagataacccccattactttagttaagctctttctcatgatctactttctttctgtccatctgtttttcaccttattcaatatatggatgaccttctcctctgcaactcctcttacgaatcttcccaacaggataccctcctgctccttcaacatctattctcaaaggagtatcacgtatccccatctgaagcccaatttctttcccatctgttacctatcttggcatagtccttcatcaaaacacacgtggtctccctgataaccatgtctggctaatctccgaaaccccaaccccttctgcaaagcaacaactcctgtccttcctaggcatggttggatacctttgcctttggataccaggttttgccatcctaactaaacccctatataaactcacaaagggaaacctgactgaccccacaaaccctaagttctttccccactcttcttttcattccttaaagacagtcctagaaacaggtcccacattagcactccctaatttgtcccaatccttcttatatacggctgaaatacaaggctgtgtggttggagttcttacacaggaaccaggcccacgacctgtagccttcctatccaaacaacttaacttcaaagttctaggctggccctcatgtctatgtgtggtggcagctgctgtttcaatacttctagaggccctcaagatcataaaccatgccccacttactctctacagctctcataactttcaaaatctattttcctcctcacacttggcgcatatactttctgcctccagactcctccaactctacttactattcattgaaactctcacagttaccattgttcctggcacagacttcaacccagctgttcaccttatacctagcaccaaacctgaacctcatgactgtatctctcaatccatatggcatcctccacatttccccatatttccctctttcctgttcctaatccagaccacacgtggtttattgatggtagttcttcaaggccaaatcgtcagtcaccggcaagggcaggatatgttgtggtgtcttccacatcggtcactgaagctactgccctgcacccttccattacctctcaacaagccgaactcattgctttaacccaagatctcacccttgtaaagggactatgtgtcaatatctacactgattccaagtatgccttccacatcgtacattaccatgcagttatatgggcagaaagaggttttctcactacacaagggtcctccatcatcaatgcttccttaataaaaatcctccttaaggctgctctactgcccaaggaagccagtcattcactgcaaggggcctcagaggttaccagatcccattgctcgaggcaacgcttatgctgataatgcagcaaaagcagcagctagtattcccacatctgtccctcatggccattttttttccttctcatctatcacttccacctattctcccactgaaactattacctatcaatcccttcctactcaaggcaaatggttcttggatcaaggaaaattcctccttcctgcttgacaggctcattctatcttatcaccctttcataacctcttccatgtgggttacaagccaatggcccatctcttagaacctctcatttcttttccatcatggaaatccatcctcaaggaaattacttctcggtgttccatctgctactctaccacccctcagggatatctcaggccccctccctttcctacacaaaaagctcgaggatttgcccccgacccaagactatcagattgactttacccataggccccaagtcaaaaaactaagataccttttggtctgggtagatacattcactggatggatagaggcctttcccacaaggtctgagaaggccaccacagtcatttcttccctcctgtcagatataattccttggtttggccttgccacctctatacagtccaataacggaccagccttcgttagtcagatcactcaagcagtctcccaggcccttggcatccagtggaagcttcatgcccctactgtcctcaatatttgggaaaggtagaaagaactaacagtcttattattattattattattattattattattattattattgttacattaggttctagggtacatgtgcacaacgtgcaggtttgttacatatgtatacatgtgccatgttggtttgctgcacccgtcaactcgtcatttacattaggtatgtctcctaatgctatccctcccccctccccccagcaggccccagtgtgtgatgttccccaccctgtgtccatgtgttctcattgttcaattcccacctatgagtgagaacatgtcttgtttggttttctgtccttgcgatagtttgctcagaatggtggtttccagcttcatccatgtccctataaaggagaagaactcatccttttttatggctgcatagtattccatggatcatatgtgccacattttcttaatccagtctatcactgatggacgtttgggttggttccaagtctttgctattgtgaatagtgctgcaataaacatacgtgtgcatgtgtctttatagcagcatgatttataatcctttgggtatatgcccagtaatgggatggctgggtcaaatggtatttctagttctagatccttgaggaattgccacactgtcttccacaatggttgaactagtttacactcccaccaacagtgtaaaagcggtcctatttctccacatcccctccagcacctgttgtttcctgactttttaatgatcaccattctaactggtgtgagatggtatctcattgtggttttgatttgcatttctctgatagccagtgatgataagcatttttccatgtgtctgttggctgcacaaatatctccttttgagaagtgtctgttcatatccttcacccactttttgatggggttgtttgattttttcttgtaaatttgtttaagttctttgtagattctggatattagccctttgtcagatgggtagattgtaaaaattttctcccattctgtaggttgcctgttcactctgatggtagtttcgtttgctgtgcagaagctctttagtttaattagattgcatttgtcaattttggcttttgttgccattgctttcagtgttttagtcatgaagtcctagcccatgcctatgtcctgaatggtattgcctaggttttcttctagggtttttatggttttaggactaatatttaagtctttaatccatctcgaactgatttttgtataaggtgtaaggaagggatccagtttcagctttctacatatggctagccagtttaactggcaacatttattaaatagggaatcctttccccatttcttgtttttgtcaggtttgtcaaagatcagatggttgtagatgtgtggtattatttccaagggctctattttgttccattggtctatatctctgttttggtagaactaatggtcttttaaaaacatacctcaccaagctcagccttcaacttaaaaaagactggacagtacttttaccgtttgccctccttagaattacagcttgtcctcgagaagctacagggtatagtctatttgactatatggacataccttcttgctgggcccccaccttgtgccagacaccagccctctaggcgactatcttccagtcctccagcaggctagacaggaaattcaccagcctgctaatcttctcttgcctactccagattcccagccatatgaagacaccctagctggatgatcagttgttgttaagaatctgatccctcaaactctacaaccgcgatggactgcttagtcatctatagtaccccaactcccgtccacctgcaggaccctccccattgggttcaccattccagaataaagctgtgtctgtcagccagccagcctgatctctcttcttcctcctggaagtctcaagcactctcccctacttcccttaaactcactcgcatttctgaagaacagtaatagcccttataaacctaacacatcccttcattctattaggtctattcgtccttaccctactttttgcaacagggctttatgaagtcatccccactacttggactgtgcccccaagacttgtcatccctattatcttctgtctagtcatacacctattcatcattctcaactactcgtaaatgccctgcccttgtttacgctgccagtttaccagtttacacttttcctccaagtcaccataactgatatctcctggttttacttcaaatagccacccttaactctcttgcagtggatataatatcttcagtggcaagatacattccaattctcctatcctgataagtctttctttttttttttttttttttttacttttctactcactcttatccttgcccctattctccagtcactctctacctctccctagttacctccagcatagtatcaacctcacccactctctcctcactgcctccaatccttctctagtaaaaaattgttggctatgcatttccctttcttcctgctcttatgcagccgtccccgctctacaggctgactgagctacctctcctgtctccctacacctctgaaccttctttaatagcccttgtctttacccacctgaggaacttctttactttctagacagatttggtgagaactccccagagatttcgcattaaaaagcggccacacttctccgcatctacttacggcacctttctctttatgtcaattccactcccccccatatttggacccctaaccacacaaacaactatccctgttgctgctcctttatgcttctcccaaaaacagcctactggaatccctttaggaaaccttccaccatccaaatgttcctttactctttatctccagaaccaagccacacacactaccaaacagatgggagcattccaacttcacattactgataagctctctatcattactgacaaactaaaaaacattggcagtcactaatgcttaggaagacacctaccctgcatctcactccatctttggctaccctcgccctgctcatttgactctcctcctgacccctcctcttgcttgcttatacccagccccatgaatagtagtgaaagactactcacagatactatgtgctttcttatacaccatgagaactgaaccttccctctacgcagttgcaccatcaatccccattacaacctctaatggctgctgcctttgctggatctctaggattttgggtgcaggacccctctttcactacaccctctcaccttttcactttacatttccagttatgcctgacacaagctctcttatttttctgtggttcttccacgtacacctgccaactggatgggcacatgtactctagtcttccttacccccaaaatccagtttgcaaatgggaacgaacaactgcctgtccccctcatgacaccaacatgacaaaaaagagtcatcccattaatccctttacttgtgggtctaggaatttctgccttcactattgcacttagaactggaatagcagctatctcaacctctgtcacaccattctgcagcctctctaatgacttctctgtttagcattacagatatatcacaatctttatctgtcctccaagcccaggttgacactttagctgcagttgtcctccagaactgccaaggcctcgatttactcactgctgaaaaaggaggactctgcatatttcttaatgaagagtgtttgtttaactttaatcagtctggcctggtatatgatgacgtcaaaaaactcaaaaacagagctcaaaacctcgctagtcaggcaactaattatgctggacccacctggccactctctaactgggtatcctggcttcttccaatcgttagttctctaatacctgtcttcctccttctcttattgagggcttgtgtcttctgattaatctctcaattcctacaaaactgcatccaggctatcactaatcactctatacaacaaatgctgcttttaacaaacccacaatatcaccccttaccccaaaatcttacttcagtctaatctctcccactttaggttcccacaccaccgctaatcctgctcaaagcagccctgagaaacgtcacccatcactcctccatacagccccaaaatttcaccccaagttttcactattcttattttatttattatttttatttcttattaacataaaaaaacaggaatgtaaggtcctctgagctggccgcaccatggtcaaaccattgtgacatccccggcccttgtgataatgtactttgtgatattccttgtcctgtgaatgtacattgtaacattcctccccacccttgtgaatgtaatttgcaacaccctccctgctcttctgaatgtactttgtaacattcctcccatcccttgtgacaatacaccctccgcgcccttgtgaatgtactttgtaacatcctccccgcccttgtgaatgcactttgtaacattcctccctgcctttgggacaagacatcctccccgcccttgtgaatgtactttgtaacatcctccccactcttgagaatgtacttcataacatccatcccctgcccacaaaaaaagtcgctcctaactccaccgcctatcccaaacctataagaccaatgataatcccaccatcttcactgactcctttctcaaactcagcccacttgtaccctagtgaataaacagccttgttgctcacactaagcctgctcaggtggtctcttatatggatgcatgtaacattactgtaaaatgagatcttgcggggtgcagtggctcatgcctgtaatcccagcacttcggaggccgaggtgggtggatcacctcccaaagtgctgggattacatgcatgagtcaccatgaccagccaggtatttctttataacaactcaagaacagactaatacacgtgactatttccagactattttgtaccaatagtctagttgtctgtgtacaatgcaacagcatcttaattactatagttttaatcttgatattcattagggcaagttcttccaccttttttatcagctgggtcttgattatccttgcctattgttcttccatataccttttagaaacagtatttcaagggcgggtgtggtggctcacgtccataatcccagcactttgggaggccaaggtgggtggatcacctgaagtcaggagtttgacaccagcctggacaacatgatgaaacttcgtctctacaaaaaaaaaaaatacacaaaattagctgagcttggtggtgcatgcctgtgatcccagctactcgggaggctgaagcaggagaatcacttgaacctgggaggtggaggttgcagtgagtggagattgttccactgcattccagcctggggaacaaagtgagacttcatcccaaaaaaaaaaaaaaaaaaaaattcttattgcttctttcagtgatttcccttttttttttttctattctctcattctagaatgccttgtagctggatattgaagctttttgcttatctcatacattatttaatttacatcctttccagcacttttctttttaggctgaattctgtgaaacattccttggcttagtctttgagatctttcttctttttgaatttgagtagttactgctatgagttgccttcttttcactactttcactgtatctgtccattcaggctgctataacaaaataccatagactggtggttaataaacaacataaatttatttctccgagttctggagattaggtcaaagctcaaggtacagtcagattcagtgtcagatgagggcccttttcctggttcacagagagccatcttcttgaagtaaccaaatacagtagaagtggcatgaaatatctttggggtgtcttccatgaggggggtaatcccattctgcagagccctcatgacttcatcatgtcccaaaattcccagctcctaatacaatcactttgggagttaagatgtcaacatacgcaagttgaggagacaaaatttatttatttatttatttatttatttatttatttatttatttatttttgacatggagtctcactctgtcacccaggctggaatgcagtggtgtgatcttggctcactgcaagctctgcctcccaggttcacaccattctcctgcctcagcctcctggataactgggactacaggcacccagcaccacactgggctgattttttttttttttttaagtagagacagggtttcaccaccttagccaggatggtctcaatctcctgaccttgtgatccacccaccttggcctcccaaagtgctgggattacaggtgtgagccaccgtgcccagcctaggagacaaaatttagactacagcaacatctcataaattttggtatgccatgtctttgttttcatttgtctcaagatgttttctaatttaccttgtgaattcttgcttcacccattgatagatcaggagtgtgttgcttacaataaaatgtatttgtgaattttccagttttccttgtttttcatttcttgtttcattctatgtgacttgaaatggtactttgtgtttcagtcttttacatttcattaagatttgttttgtggcctaacacatggtttctcctggaaactattccacatatgcttgagaaaaatgtgttctcttctgttgtggggtgggttgtgccaactgttatatagtacttgtcctgtttccttcttgatattatcgtggctgttctacctattaaattgaaagtggtataatgaggtctccaattgttatgcagaattgtctatttttccctttaattttgccaatatttacttcatgtattttaagctctgatgtttgatacatataatttttttatcttcttgatgaattttaccttctatcagtatatactctcattcactctctcttctatcagttttttacttcaagtttactttgtctgatattaatatatccaggcaaattctctttaggttactatttacatggaatgatctttttccattatttaactttcaaccttttttgtctttagatctaaagcgaaggatggccaggcgtgatggctcatgcctgtaatcctagcactttgggaggctgaggtgagcagatcacctgaagtcaggagtttgagacagcctggtcaacatggcaaaaccctgtctctactaatactacaaaaattagctgggcatggtggtgggtgcctgtaatcctatctactcaggaggctgaggcagagagaatttctggaagccaggaggtgaaggttgcagtgagccgggatcttgccattgcactccagcctgggcgacagagcgagactctgtcttaaaaaaaaaaaaaaaaaaaaaaagcaaagggcaacatacagttggattgtgtattttaatccattttgccaaattatgccattagattggagaagttatcccatttacccttcatataattaccaataaaaaagactcattttgccactttgttactctttttctgtatgtcttacagctttttggtccctcatttcctacattactgccttttttgttgatttgtttttttagtgacatctttttttcgtctcattttgtgtatattccattgatattttatatgtagttaccatggggatttttttttctttttttgagatggagtatcactcttgttgcccaggctggagtccaatggtgcgatttcgagtcactgcaacctccacctcccaggttcaagcaatcctcctgcctcagcctctcaagtagctgggactacaggcatgcaccaccacacccagctaatttttgtatttttagtagagacggggtttcaccatgttagccaggctggtttcaatctcttgaccttgtgatccacacacctcagcctcccaaagtgctggaattagaagcatggcctggtgaccacggggattaaatataacatcctaacatccactgtacagtccactgtccagtcctcactcctcccacatgctgttcttactaaaatatagaaaaaattctactagggggaattttaaaagcaattaaacttttcaaccacagaaaatttactgtccatgacaagtcgtcatggacagtaagacacatagaaaggcaatctcattttcatgtcatttatttcaatttctcctctagtatgatcttgtgtacagtaacagtagtatctgaaagcttcccataactcctcagattcatagtttattcttccagtgagtattttcagaggcacttaaggaatatgtactgctaaaagtattaccaggccgggcgcggtggctcacgcctgtaatcccagcactttgggaggccgaagcgggcggatcacaaggtcaggagatcgagaccatcccggctaaaacggtgaaaccccgtctctactaaaaatacaaaaaattagccgggcgtagtggcgggcgcctgtagtcccagctacttgggaggctgaggcaggagaatggcgtgaacccgggaggcggagcttgcagtgagccgagatcccgccactgcactccagcctgggcgacagagcgagactccgtctcaaaaaaaaaaaaaaaaaaaaaaaaaaaaaaaaaagtattaccagattttttttttttttgagatggagttttgctctgtcacccaggctggagtgtagtggcaaaatcttggctcactgcaacctctgtctcctgggttcacacaattctcctgcctcagcctcccaagcaattgggattaaaggcacccgccaccatacttggctaatttttgtatttttagtagagatgaggtttaaccatgttggcaggctggtctcaaactcctgacctcaaatgatctgcccacctcggcctcctaaagtgctgggattacaagcatgagtcaccacgcccagcatattctcatattttcacattcatatagcttgtttgcagtgtgggttttcacaagtatagtaagacttgtaaaatggatgcaacatttccctcattctgtattatcaagatttctctccagtatgaattatcatttatattaaaggatgaaataatacatacgtgtgtgtatgtgtgtgtgcatatatatgtgtgtgtgtgtgtgtgtatatatatatatatatatatatatatatatatatatataaagacattcccatatttctaacattcataatgtttctggcctctttgagattaccaaatattaacacatgagacagaagtaaagatttcccacatcttaccttcatagagtttctctccaacgcatgttgactgacttagtaacactggaagaattcttaacacatcttaaattgatgaggtttcttatatctgaaactgtcagaaatttctgaaggctgtcccagatttcttacatatataggctatctgcccactgtgagttctttgatgttgagttattaaaaggcataagtgaagatcttgtagcctttacatttgtagggttttataccactgtgaattctcatgtagatattaagtcctgagcactaagtaaatgttttatcacattccttacatacagagggtttttctccagtgttgattatgaagtactatgaaggtttgtgaagtattttaaggctatctctcattcttaccttcaattggcttttacagtaatttttgttatgaaaaataaacaatatgctgggtgtggtggctcaagcctgtaatcccagtactttggaaggccaaggcgggcagatcatgagatcgggagatcgagaccatcctggctaacatggtgaaaccctgtctctactaaaaatacaaaaaattagctgggcatggtggcacatgcccgtagtcccagctactcgggaggctgaggtgggagaattccttgaacccaggaggcagaggttgcagtgggccaaggtcatgccactgtactccagcctgggtgagagagagagactctgtctcaaaaaaaaaaaagaaaaataaacaatagtggaagaaacaaaggctttaccacatgccttagaaccagatttttctcccaaaggtgagttcttacactttataagatgtgaagaattactactcttgcctattccttatatcactgggacttgtgtccatgttaaattcattcctattatataagatatggaaattcagtgaaggttgttcatattctttaccttcctatgatttttttccagatgagtttagatgtaaatactaagatctgaggaacacttcaggttttttcacatgccttagttcttagatgtttagcaagtgctgaagattgagtgaagtttttcccacatttcttacattcatatggttttgctccagtgtgagttcgtgtgtgaacgttaaggtatgtggaatacctgaaggctttcccacattctttacatgcataaggcttttctcctgtgtgcgttcgcatgtgcatattaagatttgtggaacgagcaaatgctttaccgcattccttacattcacaggccttttctccagtgtgagttcttaaatgggtactaaggcccgaggattgagtgaaagctttcccacattctttgcattcatatggcttctctccagtgtgaatccttacatgttgactaagcattgaggaattattaaaggctttcccacattctttacattcatagggcttttctccagtatgtgttctcatgtgtaaaacaagtcctgaggaacgagtaaaagctttcccacatgccttacataaatacagcttctctccactgtgaatccttacatgttttgtaaggtatgaggaatgaataaaagcttttccacactccttacattcatatggcttttctccagtgtgaattcgcatgtgtaaaataagtcctgtggatctagtgaaggcttttccacattccatacatacatagggcttctttccactgtggattcttgtatgatcagtaaggtatgaagaatgggtgaaggctttcccacactctttacatttatatggtttttctccactgtgagttctgatgtgtaatttaagtcctgtggattgagtgaaagctttaccacattctttacagacatagggcttctctccactgtgaattcttccatgtcctataaggtgtgaggaattactgaaggctttcccacattccttacatacatagtgtttgtctccattgtgagatcttatatgtaacttaagggatgactgattaagaaaagttctccaacagtctttgcattcacacaatttctcttgtgtgtgagttttattctgcctagtaagatttggaaactggttgaaggctttttcatgtttaacacacttaggcattttcccctcagcatgacttttcttgtaaaaactatgaggaaagttctttcttaaggcttttccactctgattatcctcagaagttttctctccaatgtgagttatcatgtgagtcataagaaatgggtgttcattgaagacttttccagaatggttagagtcatacagtttctctgcagtattgcttctctcctgttgagatataaaagatgaataaagaatttctcacattcagtatggtaacagaatttctccccaatcacaacatatatgcattggaaatatatttaaacattttaacatatccattatatgtacagagttccagccccatttttgagttaagttgagtaataggacaatgaggccaccagcctgcctatattctctgcattcacagagcttcttagacaatctgtctgatatttatttatttatttatttaagaaagattctcactctgtcacccaggctgaagtgcagtggcacgatcttgactcacagcaatctctgcctcccagttcaagggattctcaggcctcagcctcccaagtagctaggattacaggcatgtgccactatgcccagctaatttttgtatttttagtaaacacagatttttgccatgttgaccaggctagtctccaactcctggcctcaagtgatctgcccgctttggcctcccaaagtgctgggattacaggcattagccacaatacatctgagaattatttagactaaattatgggctgggcacagtggctcatgactgtaatcccagcactttgggaggccaaggcaggtggattgctttgagctcaggagtttgagaccagcctggacaaaatggtgaaaccccatctctacaaaaaaaaaaataatcagccaggcatggtggctcatgcctgtagtctcagctattcaggaggctgaggctggaggatcatttgagcccaggaaacagaggttgcagtgagccaagactgcaccattgcacaccagcctgagcaacagagtaagaccttgtctcaaaaataataataaagtaaaagaaattatgcacaaaaaactgaatagctgagttgtatgtttgtggatgtttatttgtgagatctctgagaagaaatatgtttgtagtaagtttagagtgcttcccatattcatgatattcagagaatctcttcagactttgttttctctgggtaaatgccattttcctcatataattttcatgaatattgtgcttcttgtcctagtgtggaagatttcatcccttggaaatcttaccaattgtactccatttggtgatctttctgcagaaatatcttgcagcagtggggagcctttggttttgagttgcaaatccaattctgaaataaagtgaaaaatgcagcttgggagaaaaattgtggaataaagtcgtttaaaagcctatggggctgggcgtggtggctcacacctgtaatcctagcacttttggaggcctagataggtggcttacctgaggttaggagttcaagaccagcctggccaacatggtgaaacactgtctctactaaaaatacaaaaaattagccaggtgcagtggtgcatgcctgtaatcccagctactcaggaggctgaggcaggagaatcacttgaacccagagggtggaggttgcggtgaggtgagatccaccactgcactccagcctgggctacagagcaagacttcgtctcaaaaaaaaaaaatgcctaaggaacagacatagcataatcaaatgtggcagagtgaagaactacagggctctttcctaccacaatatgactaataagttcagaaaacctatcagaatcaactgtgctgggctgggtgtggtggttcatgcctataatcccagcactttgggaggtcaaggtaggtggatcacttgagttcaggagttcgagaccagcccggccaacatggtgaagtgctgtctctactaaaaatacaaaaattggccagacatggtggtgtacacctgtaatcccagctactcaagtggctgagtcatgagaatcacttgaaaccaggaggcagaggttgcagtgagtcaagatcatgccattgcactccagcctgggtgacagagtgagactctgtgtcaaaaaagaaaaaaatatatatatacatatatatatagctaagtgaaagaagctagagagaaaaggttacattgtatgattccatttatataagatatacagaaagggtaaatccgtagagagagaaagcaaattagtctctgtagggtgagtggggactgactacttgatgggtatatggtttccttttggtgtgatggtaatgctttgaaactagaccaagcacactggctcatgcctgtaatcccaacactttgggagacggaggcaggtgggtcacttgaggtcaggagtttgagaccagcctggccaacatggtgaaactccatctctatcaaaaaacacaaaaattcaccaggcatggtggcgcacgcctgtagtcccaactactcagaaggctgaggcaggagaatcacttgaagccaggaagctgatggaggttgcagtgagccaagatggctccactggactctatcctgggcaacagagagagactctgtctcaaacaaacaaacaaacaaagaaatgccttgaaactaaaaagagctgatagctacacaacactaaaatggtaaatttttgtatattttacctaaaaaaagtatatggcacatttgtatatctttccaaacatgcataaaacatgattaaaaaaaaaaagagtgaagcaaatggaaagatggactataaagagtttggctatgtcagaagttttgcaatggtaaagatatggtgtcaaaactatcactacacctgtaatgccagcactttgggaggctgaggcaggtgaatcacaaggtcaggagttcgagaacagcctggccaacatagtgaaatcccatctctacaaaaatacaaaaaattagttgggcgtggtgtcaggtgcctgtaatcttagctacttgggaggctgaggcaggagaattgcttgaacccaggaggtggaggttgcagcaagccaagatcatgtcactgcacaccagccagggcgacagtgcaagactccatctcaaaaaaaaaaaaaacctgtattacttattatccaactaataatatgcagaaaactgaggctggtagtaagcaaaaagatgggagaatcaagaaagcaatataagaaggtgttggcaaaggacctacatgcataagatggaattttcaaataaggcagacaaacctttctgagaacagaaaagaggttgagaagatcaatggaaatttaaagatgaggggagttgaaagtatctaaggaaaccaaatggcctcagccttctcaggaagaagagtataccctgagaagttcgcaaagtaacatttccaatgtactgcatgtctcctagggtggcacagcagtgccataataccacatctgcttatgaactcaccctgcagaactcctgtcactcctgtcctcagctcttccatttgttccaatccagacatgagactacgtttgaataattcagaccctgctggagggaaaaatgcacaaaagaagaggcccatgcaagacataacaccatgtccttcaatggggaaccaatacttttgccttcggggattctaaagatggtcaagtgtaactttacaaatagcaaactaatcatataacatttccaatacatgcactaaaactatttttaaaataacaaaaatgttgcccaggtataatggctcatgcctcatacctcagcactttgggaagccaaggcagggagatcacttgaggttaggagttcaagaccagcctggccaacgtggtgaaacttcctctctactaaaaatacaaaaattagcagggcatgctggcacaggtctgtggtcccagctactcagaaggttgaggcagaagaattgcttgagcctggaaaaccaagtccaacttcatacacatttaaagtcttaaagtttttaatccatacattaaataaactcatttacttaaatctttattttcatggggaatcctctacaccaggggtgtccaatcttttggcttccgtgggccacactggaagaagaagaatggccttggaccacatataaaatacactaacactaacgatcgctgatgagctacaacaaataaacaaaaaaactggtctgtgcataaatctcataatgctttaagaaagtttacaagcttgttctataaagtaatgcccaggccatgcatggtggctcacgcctgtaatcctagcactttgggaggccaaagcaggtggatcacctgaggtcagagtttgagaccagcctggccaacatggtgaaaccctgtctccactaaaaatacaaaaattagatggccatggtggtgcacacctgtaatcccagctacctgggaggctgaggcaggagaatcacttgaatccaggagggggggctttgcagtaagcagagaccatgccactgcactccagcctgggcaatagagccagactgtgtctcaaaaaaaaaaaaaaaggaatgtccactggccaaggtccatgcctgtcttgcttattacagtaccctcatttgacagcaaacatttaagaaacattgatttcctaaaggggtcagtgaagaaatgatgccagttttacctagtataatgagattcttgtagttctccaacatcacatctctgtagagatctctctgggcttgatccaacaaagtccactcctcctgggtaaagtccacagccacatcctcaaaggtcactaagtgctaaaccattaaatacatgccagcttcagctaagtaccatctcctttgatgttctgagaaaaatgcatgaaggactaaggaagactagaagcctgcagtactcccaggcctcaggcctcttctcctctatatagatattgtcttgcaatggcatccaatcccatggacttatcagcatcactgaaacatgactaaactgatcttcctacagctttacaatgggctcttctggccttagtcctcctctatttataggtgcagtctgcactgaatatgttgcagcactatgtaaaatctaataacaaatgaattatctccacagtgacacacaaattccttcagattagacatctccatccctttcttacaatctgtcataacactcagcaaaacaatgagccaacaagcatgattgaggatcagaaagaattagtaaacattgagataaaataatcatttctgtagggagacccactgaaactattgctacagaataaaagatgaaatgctcctgattactgtaaatacaaaattgcatgcaggattgtgtaaagacaatgccaggttggactgccagaatgagccaacagcgtgtgatgtgcttccccctgcacagagcctatgaatggacgtgcagtcagggaggtttcacatcaccaagattcctatcccagaaaagcagatgttcatagctctgggaatggaatgcgacccttgtggagagcctataaacagatgcatggggggtgcctgtccatatggataaacgccctcatcttgtcacggctcttgtaggcctctttaaagttaaggcatactcccttctgagaacttctggtctaaccagttgtctagcttcacatcctgtttccatggattgtttctaaccagcatttgtggcaattgttactgctgattaatatcttgctaatcataggttatggaaagattgtgtttctgttttaaggctctgttagaaattactgacacacacactatattttaaattcttgtctctgtatactgtacttctacatacaaatgtactgtacttctacatacaaatgttatgttaaagaattacttcatccccatgtgaccatctcacctcataatcaaatgaccctaaatccctcactaacctacccccgccctcactaagcttaataataactgctggtatatccagtgcattgttggcactgtgggaccagaaggcggtgacccccctggacccagccttcactatcttgtgtgtgtctattatttctcaacctgccaatctgcctgggaacaaagagagagccccgttgcactgtgggctgctggccagatcccgcaatacacttccattgcaatctctgtacaacctgagatggcttggttcctagagaaattcacctggggagttatttcctgagcaggaccatcatttctttaagatgcttgaatacacgataacaaggtaaggctaccgatgatggctacaagcataacattttgaagttaggtctgctttccacttgcctgagaagaatccatcagtaatccatcagtaacccagccactagccttggcttctcgatgttcctgtcatgaagacagaaagtgtcctggaaaaaatgacctttggaaaagaataatggcatgtcagttggatacatcaaagaaaaagtatttcaggctaggcatggtggctcatgcctgtaatcccagcactttgggaggccaaggtaggcgaatcacttgaggtcaggagtttgagaccagcctggccaacagggtgaaaccctgtctctactaaaaatccaaaaaaaccagccaggtgtggtggtgcatgcctgtaatcctagctactcgggaggccgaggtgggggaatcacttgaacctgggaggtggagattgcggtgagccgacaccatgccactgcactccagcctggctgacagagtgcgactccatcttaaaaaacaaaaaagtaggccaggcacggtggctgacacctgtaatcccagcactttgggaggccgaggcgggtggatcacgaggttaggagatcgagaccatcctggctaacacagtgaaaccccgtctctactaaagctacaaaaaaattagctgggcatggcggcgtgtgcctgtagtcccagcagctggggaggctgaggaaacagaatagcatgaacccaggtggcagagtttgcagtgagccgagattgcaccactgcactccagcctgggtgacagagcaagactccatctcaaaacaaacaaacaaacaaacaaataaagcatttccataccctgcattgcagacatagtcttttccatggcatgcctcccaattgtaatactattctgacacttaatactctaattgtccagggggtggctcatgcctgtaatcctaaccctttgggaggttgaagtagaaggatgcttgaggccaggagttagagaccatcctgggcaatatagtgagaccaagtctctttattaaataaataaataaacaaataaatatacatatatatatatacacatatatgaaaacaaagaataaaagaaaaaatactctagttgactttgcctagcaactatcagacagtaagaatacttttgtgtctggcttctttcagtcagcattatgctggtgaggtgcacccaagttgttgtgttcatccacctgtgatttggttcatatctttgctgaagaatatgccacagaggctgggcatggtggctcacgcctgtaatcccggcactttgggaggccgaggtgggcagatcgcttgaggtcagcagttcaagatcagcctggtcaacatggtgaaaccccatctctactaaaaatacaaagaaaaatgggtggctcacacctgtaatcccagctactcgggaggctaaggcaagagaatcacttgaaccaggaagacagaaattacagtgagccaagattgcgccactgcactccagcctggtgacagagcaagactctgtcacaaaaaaaaaaaaaaaaagccacagaaatatgccacaattcacccattctgtggatccacatttgggttgttcctaatttaggctatttcaaataatgtgataaataacttttacatttagcctggcacacgtatgcatgttgcatcaccaagtccatatttagttgtcactgttttaaaatgtagctgggcatggtggctcacgcctgtaatcccagcactttgggaggccgaggtgagtggatcacaaggtcaagagatggagaccatcctggccaacatggtgaaacccatcctggccaacatggtgaaaccccatctctactaaaaatacaaaaattagctgggcatggtggcatgcacctgtagttccagctactcgggaggccaaggcaggagaagcacttgaacccgggaggtggaggttgcagtgagccgagatcatgccactgcactccagcctggcaacagagcaagactctgtctcaaaaaaaaaaaaaaaaaagtgttctcttcagcaatgcatgcacatcttaaagaagacttgatattgtcactgactttagttatgcttttatttatttatttttttttttgtagagatggggtctcactatgttgtcccagcttgtctcaaactcatagcttcagtggctcctcctgcttctgcttcccaaagtgctgggattacaggggtgagccactgtgcccggcctagttttatttatttatttatttatttagacggtgttttgctcttgttgcccaggctgtagtgcattgccacgatctcagctcaccacaacctctgcctcccgggttcaagcgattctcctgcctcagcctcccgagtagctaagattacaggcatgccccaccacacctggctaattttgtatttttagtagagacagggtttctccatgttggtcgggctggtctggaactcccaacctcaggtgaaccgcccacctcggcctcccaaagtgccaggattacaggtgtttaagttaccgcacccggccaatacacattgatctacacaagagatgcaaagaaacagaaaacatgcaaaatattaacaaatgatcagtctacaacaaggatatataataggtgttcaatattctggcctttcacattttctttggtttagaatattcaatctacagatagcctgggcaacaaaccaagaccctgtctttaaaacgtaaataaataaataaaaatatatgagggggaaggccaggcgcggtggcttatacctgtaattccagcactttgggagtccgaggagggtggatcacgaggtcaggagttcgagaccagcccaaccaacatggtgaaaccccgtctctactaaaaatgcaaaattagccgggcgtggtggcacatgcctgtaatcccagttactcagcatgctgaggcaggagaatcgcttggaccgggagacagagtttacagtgagcctatatcacgccattgcactccagcctgggcaataagagcgaaactccgtctcaaaatatgtatatatacgagaggaaaaacgctgaatcaaaacatgtctctttcacagttaatacaactgtaatttctgatactggtataatgaaggcggcatcctacttcctggaagcccctccgttttgaagctctttgggaggtactgacctaggaagttcagctgcttttgatctcaaaaacacagcggagtattgctactttgctttataactgtggcaatatttgcttttatttctataaacctacaactcctgcacacttgacaaagcatttaactgctgagcaatttcgcaaacttcaataagcgatgccctcccacagccagatcatctcctccgtccagggctcaccggaacgcactgcaatcgccctgtcggtgacaagaggacgctggggcccttttccacaacagctgagatgcttttccttctggagaaaggacacaaaggttgactggctgcttttaaacagaggggcacggtggttggagaaaaaaacacgtctccaccggggaccctgggccaggcccagactgatgcgggcgcagcgggaagaggcgctcagaagagaaggcgggaaccccccgcctcggggtcctggcggggaggaggcgccgcttctccggagcagcagcgggaggccggcgcgtctcagacctagcagaagtccggagcgtcaccctccgaccctcgctccgcctcccgctaggccctcctgccccgccctgcctaggttgagcatgagcgctggctgaggtgaaaacccagctaggaagctgctggagagcggggaatacgtatagctgcgcgccggctggcacttccgcttccggttgcgcacggcattaagtgtaggggccgagccccaagagctttggaatgaggatgatgtgaagctgagagaagagctggggccacctcttcgacacgcgtacagaaaagtcccgttttctcgcatcccaggtggaccaggatccagatcaatctgtcgatattgggaacgacgccggaccaggaaacccagcgccaagggccgggttggaggcggggactggcgcagcgggcggggcacgcgtggaggcgtcacctaaggcttcgattgcagacagcgggatgctcatcgagtgcttttcttttcttttttaatttctctttttagttttttgagataaggctccggtctgtcgcctaggctggagtgcagtggctcggtcatagatcattgcagcctggaattcctgcgctgaagctatcctcccgcctcggcctccggagtagcttggaccacagttgggcccatcacgcccagctaagttatctttttctagacacttgggtctcactgtgttccctaggctggtctcgaactcctgagcctaaaggatcctcccccctcggcctcccaagcagcttggaccacaggtgtgtgccaccacgcctggctaatttatttttattttatttttatttttttgtagagacagggtctctctttgttacccaggctgatctggaactcctgggctccagtgatccttccaccttggcctcccaaagtgctgggattataggcgtgagccaccaccctagggaaattcttttctgcaggattttctccttgtttcttcaaccctctgcagggatataaacatatttacaaagataatcccgctgtagtcctagctactgcgggagaatcgcttgagcccaggagttcgagaccagcgacaccctgtttgaaagattaacctgatggggctgggggcagtggctcacgcctgtaatcccagcactttgggaagccgaggcgggtggaacacgtgagttcaggagttcgagaccagcctggccaacatgccgaaaccccatctctactaaaaatattttttaaaaaatagccgggtgtggtggtgggcgcctgtaatcccagctactcgagaggctgaggcaggagaattgcttgaacctaggagactgaggttgcagtgagctgatacgatgccacagtactccagcctgggcgacagagtgagactccgtctcaaaaaaaaaaaaaaaaagattaacctgttaatccataaaatgctctgtgcctctgatacattcagttccttctttaggcctttagttttgttgtgatacaattatcatagcatacaattaacctgtttaaagtgtacagtttcgtggctttttgtatattcatatatttgtgcatcgatcatcacaatcaattttagaacattttcatgaccacaaaaataaacccagtaccctagccatgatcacccaatctgctcatccagccccacccccacccccagagtccaaagcaacagctaatctttctgtctgtatagattgcctactgtagatattgcctgtagaattagaatataaaacacgtggtgtttggcttgtttcattcaatgttttcaaggttcatccaattagcatgtatcagtacttaatttttttttactaaataagattccattgtatggctgtatcataacatcagttgttggatattgggttttctcttttttttttttttttggcttttttggataatacaagacgcattttaagcagtggtcaaaggaacattcatattcctaaacacttttgtcaataaaaataagaatagctgggtgcagtggctcacacctgtaatcccagcattttgggaggccgaggcaggcggatcacctgaggacaggagtttaagaccagcctggccaacatggtgaaacacggtctctactaaaaaatacaaaaaccagcagggcgtggtggtgcgcacctgtaatcccagcttctcgggaggctgaggcaggagaatcacttgaacctgggaggcggaggttgcagtgagctgagatggcgccacggcacttcagcctgggcaactgagcacaactgtctcaaaaaaataaaaaataaaaaataaatccccagctcaaaaaataaaacctagaaaaagaatataaatgtaaaccaaaatggaaaaaggtttatttatttatttattttttatttcaatagcctttgggaaacaggtggttttgggttacatggataagttctttagtggtgatttctgggattttggtgcacccatcatccgagcagtgtacaatgtacccaatgtgtagttttttatccacttttatccctcacccttctcccacccttcccccagagtccccaaagtgcattctttctttctatccttttttgttttgttttgttttttctttttgagatggagtctcattctgttgcccaggctggagtgtagtgacatgatcttggcaacctccgcctcccaggttcaagcagttctcttgcctcagcctcctgagtaagtgagattacagacatgcgccaccatgcttggctaatttttgtatttttagtagagatggggttttcccacgttggccaggctggtcttgaactgctggcctcaagtgatccacccacttcggcctcccaaagtgctgggataacaggcgtgagccactgcgcccacccaaagttcattatatcattcttatgcctttgcatcctcatagcttagttcccacttataagtgagaacatatatatggttttccattcctgagttacttcacttagaataatagtctctatccaggttgctcagaatgctatgactttcttgctttttatagctgagtggtattctgtggtgtatatataccacatttttgttatccccttattagttgatgggcattgagactggttccatatttttacagttgcaaattgtgggctgtaaacatgtgtgtgcaagtgtcctttttttttttcttttttgagatggagtctccactctgctgccaggctggagtgcagtggcctatcttggctcactgcaacctccgcctcctgggttcaaatgattctcctgcctcagcctcccaagtagctgagactacaggtgcacaccaccatgcccagctaatttttgtatttttagtagagacgaggtttcaccgtgttggtcaggatggtctcggtctcttgacctcgtgatccacccacctcagcctcccaaactgctgggaatacaggtgtgagccaccatgcccagcctgtttcagacatttttaagactatgtcccattcatttaaaatactatttttccccattgaattgttttgacacctttgtcaaccatcattagactgtaaatgtgagcttagatgttttaaatggagaattataccaaaccttccaagttcaaatattcccagtgctccataacttaagaacaatgaaaatgaagaaatacttcctaattccttttatgaagaaagtataacattgatataaaatgtggtagaggctgggcatggaggctcacacctgtaatcccagcactttgggaggccgaggtgagtgggtcacctgaggtcaggagtttgatactggcctggcaaacatgatgaaaccctgtctctactaaaaatacaaaaatcagccaggtgtggtggcacgcacctgtaatcacagctacttaggaggctgaggcaggagaatcgcttgaacccaggaggcagaggttgcagtgagctgagatcataccgttgcactccagtggtgacagagcaagactccgtctcagaaaaaaaaaaaaagtggtagagtacaaaaaatgaaaaattgcagaaccatatcaattatgaatatggattcaaatatgctgttagctattagcaaataaaatacaagaccacattaagaaaataactatccccacatgaaatttagcataaaacagcagtattagtgcagttattagaaaatccattaaatagtccaggtgcagtgccttatgcctgtaatatcagcactttgggaggctgaggtggaggttgcattgcccaagctcatgagttccagaccagcctgggcaacatgttgaaaccccatctctacaaaaaagacaaaaattagtcgtgtgtgatctcagctactcaggatgaagtgggaggattgcttgaacccaggaagtggaggctgcagtgaactaaaaccgaccatgcccctgcactctagcctgggtgatagagccagaccttgtctaaagaaaagaaaagaaaaaaaatccattaaataatgcaccataaaaatacatctacaagaacaagtcatgtgactttctccatagatgctgatgaagcctttggaaaaaattcaacactcatttattattattgttattattattgttgtttgagatagggtcttcctatgttgtgcaggctggatcaaactcctgggctcaagggatcctccttcctcagcctcctgagtagctggggctataggcgtgcaacaccacacccagtgcaatgtcccttattgatatcagcactccagaaaaatagaaattagtgaatactttcttaagatgattgcctgtacctatagctgagtgtgtgtgtgtgtctgtgtgtgtgtgtactggaagcattagctaatacaattcagtaagaaaaattaattttgaaacatagaattgcagctgggcacggtggctcacacctgtaatcccagcaatttgggaggccaaggtgggaggatcacctgaggtcaggagcttgagaccagcctggccaacatggtgaaatcccgtctctattaaaaatacaaaaattagccagacatggtggcatgctcctgtaatcccaactactcaggaggctgaggcaggagaatcacttgaacccggtaggtggaggttgcagtgagccgagattgcaccactgcacttcagcctgggcgacagagcgaaactccatctcaaaaaaagaaaaagaaaaagaaaaagtaaataagcatagaattgcaaaagaaggaaactatctctttttgcagatgatgtgatattatatatggaaagccctagagaataaaataataagttaacagaatgtgaaattgctatctaaaaaccaatggcattcatctaccagtcaaaagccagtaaggtgatgtaataaaacttatgtagaataacataaagatacttaggtttagacttatcaaaaaatgtgtaaaacatacatgaagaagctttaaaacaaacattcttgaaagacacaaaatagacttgaacaaatggaaaattccttgttcttctataagatgacttaacatcatatagatagcaattcttaacaggttaactcaaaaatataacaatcccaggccgggcgcagtgtcttatgcctgtaatcccagcactttgggaggctgaggcaggaggatcaggaggtcaggagatagagaccaccctggctaacacgatgaaacccagtctctactaaaaatacaaaaaattagccaggcgtggtggcaggtgcctgtagtcccagctactcgggaggctgaggcaggagaatggcgtgaacccgggaggtggagcttgcagtgaactgagattgcgccactgcactccagcctgggcaacagagcaagactccgtctcaaaaaaaaaaaaaaaataccaaatccaagatggcggccagcaggaggctgattaagagcttgaggaaatctgcaaatgtgggatgaaaaacttcccgtaacatccaggttgatgaagctaatttattgacttagcaagggcttattgttcctgacaactctccatatgattaggtgaccttcagaatcgaaatcaactttccagcagagtatccattcaaactaccaaagatcacatttaaaacaaagatctatcacccaaatatcgacgaaaaggggcaggtctgtctgtcagtaattagtgctgaaaactggaagccagcaaccaaaaccgaccaagtaatccagtccctcatagcactggtgaatgacccccagcccgagcacccgcttcgggctgacctagctgaagaatactctaaggaccgtaaaaaattctgtaagaatgctgaagagtttacaaagaaatatggggaaagtgacctgtggactaaaatctgccacgattggttccagcaagtgtaagcagaggccccatgcagtgcattcagacacccggcaaagcaggactctgtggaaattgacacgtgccaccgcctgacattcacttgtggcagttactaactttctacagttttcttagtgaaaaatggtgtaggtaatctgtaaagaaaggattaaaatctaagatgttttaaatatatatacatatatatgtgtatatatatgtgtgtgtgtgtgtgtgtgtatatatatataacaatcccaataaaaaaccaaactttttaatggagttttgtaaattaattttaaagttcacatgggagcacaaacgtctgataatacccaagaaaactctgaaaaacaaaagtgacaatgccctacagatattaagacatactataaagcctctacaattaaaactgtggataggaacaggaacaggaaacagacaaatgggataaaatggaatatctagaaatagatccaggaacatatgggaattcagttcagaaaggtggtatttcagatcaattggggcaaaaatgcagtttgcaatgaaaggtgctaagattaagtggttagccatctggaaaaagacaaaattacatggataactcacaccattcacaaaataaactccaaatgaatcagggaactaaatgtgaaaaacaaaaatatatgcatatgtagggtatttgaatgatttttgggtgattaacgtaaaatatgtgaccacaaggcagcagtagctcacttgggcagtgctttgatgggtttgtgtgtggggtcccttgtgggcagcaagccacccaggtgctgaagcaagagaccgaggacacgagctgttccagtataataaaacataaaacaagaatagttgtaccagatatagatcatagacatgattatatatgaatatcattaatcattagtttgtggcaattactctttattccaatattataataatccttgctctataatcataacctaggaaaaatcaggctatacagagataggagctgaggggacatagtgaggagtgaccagaagacaagagtgcaagccttctgttatgcccagacagggccaccagaagggctccttggtctagcggtaatgccagcgtctgggaagacgtccattgccaggtggaccatggtctagcggtagcgaaaactgtcaaggaacaacacccgctacttagcagactgagaaagggagtctccttttccccgggggggtttatagaagactctgctcctccacctcttgtggagggcctgacatcagccaggcttgcccactgttatctggaggcccaaccgtctccctgtgatgctgtgcttcagtggtcacactcctagtccgccttcatgttccatcctgtacacctggctctgccttctagatagcagtagtaaattagtgaaagtactaaaagtctctgatatgcagaaataatggcataagctgtctttctctctgtctcctctccctctctgcctcaactgccaggcagggaagggccccctgtccagtggacacgtgacccacgtgaccttacctatcattggagatgactcacactctttaccctgccccttttgctttgtatccagtaaataacagcgcagccagacatttggggccactaccggtctccgtgcattgggggtagcggtcccccaggcccagctgtcttttcttctatctcttagtcttgtgtctttatttctacactctcttgtcgccacacacagggagaagcccaccgaccctgtggggctggtccctgcagtccctcatagcatgagaatatccaaaggctacagacttggaggtcactactcagaatgggaggagagcaagagaactccagggaaagaatgggagttgagagggagcttatgtgctaggtgaagttgcttagcagcctagtgggaagtttctaaatcagaaagctctgaagagcagcaagggattggggtcctttttatagctggagggtttatcttctctgtggtcatcaaatggttggcacaatttcaccggggtatgcagagcaggcaggccctaaaggactaaaaaatctgcttgtttggactatgtttaaaacaattgattcaggatcattaaaaaaaagaagaagaagaacgaaagaaaacacacacacacgcacacacacacacacacacacacacacaattggatggccaagcatggtggcttgcacctgtaatcccagctacttgggaggtcaaggcaggaggattgcttgaacccaggagtttcaggctgcaataagctgtgatcctgccactgcactccagcctgggcaacaaatcaagaccctatctttaaacaaacaaaccaaaagaaaattaaaaacaattgggtgtggaaaaacttgagtttggagccgggtgcggtggctcatgcctgtaatcccagcacttttggaggtcgaggtgggcagatcacgaggtcaggagatcgagaccatcctggccaacctggtgaaatcccgtctctactaaaaatacaaaaattagctgggcgtggtggcatgtgcctgtaatcccagctacttgggaggctgaggcaggagaatcccttgaaccagggagtcggaggttgcagtgagcccagatcgtgccactgcattccagcctggcaacaaagtgagactctgtccaaaaaaaaaaatttaaacaattggatgtggaaaaacttgagtttggggccaggtgcgatggttcatacctgtcattttagcactttgggaggccaaggtgggtggatcacctgaggtcaggagtctgagaccaagctagctaacatggcaaaaccccatctctactaaaaaatacaaaaaaaaagccagactaaaacttgagtttgacactggcagctattgtgagtaacggtgctatgaacactggtgtacaaaccaaaacaatacagaaaaaacccagcaaacactggacaaaggagagaatcagctttccagagttacagtattatcagattcaaatgtccagtttttaacaaaaatctcaaggcacacaaacaggaaagtatggcccattcaaagaaaaaataaataaatataaattttccctggaagagacctaatggtatatctactagacaaggactttaaaacaactgccttaaagatgttcaaagaactaaaggaagacatggaaaaactcaagaaaatgatgtatgaacagaatataaataacaatcaagagatagaaaacctaaaaagaaaccaagaagaaattctggagctaaaaaatacaataattaaaatgaaaaattcactacagggattcaaaggagatttcagctgttgcatcccagacctctccatggatgatgtcaaaggcatccccagtagtgacaaccaaaaatgtctccagacattgctaactgtcccccaggagtaaaatcatccccattggaaatcactgctctagacctacctcccaatttacagaaaatgcaggtgacagaaaaacaagctaaaagaaaccatgagggggccgggcactgtggctcaggcctataatcccagcactttgggaggccaaggcggatggatcacctgaggtcaggagtttgagaccagcctggctaacatggtgaaaccctgtttctactaaaaatacaaaacagccaggtgaggtggcatgtgcctgtaatcccagctactgaggaggctgagacgggagaattgcttgaacccaggaggcagaggttgcagtgagctgagatcatgccattgcagtgcagcttgggcaacaagagcgaaaactcgtctcaaaaaaaaaaaaaaaaaaaaaaaagacgcaaggtctcgctatgttgcccaggctggattccaactcctgggctcaatccatcctcccaactcagcctccccagtagctgggactacaggtgttagccaccatgccctatcttcaaagtttaatactatgctagtatataagaaaactgatactttataacccaatgttgaaacaatattcctctggaatcagactgcctgagattgaatctaggcttaaactctctgtgcataatatttttcatttgtaaaatgagggttagattaatatccactttctagctctgagggtaaatagttgaatagaatgctcatgtgagacgatttaactctgacatttcagccaactgtagcttcggggtgtcaccttgaaaagaggttggttcctttggaagaaatgttacttccagaagttagaataaaaggaatttatttatttatttatttatttttgagactgagtttcactcttgttgcccaggctggagtgtaataacacgatcatggcttaccgcaacctccgcctcccgggttcaagcgattctcctgcctcagcctcccaagtagctgggattacaggcatgcgccaccacgcctggctaattttatatttttagtagagacagggtttctccatgttggtcaggctggtctcaaactcccgacctcaggtgatctgtctgcctcagcttcccaaagtgctgggattacaggcatgagccactgcaccccaccagaattttttttttttttttgaggccaagtttcactcttgttgcccaggctagagtgtaatggcgtgatctcagctcactgcagcttctgcctcccaggttcaaggaattctcctgcctcagcctcccaagcagctgggattacaggtgcccaccaccacacccagctaattttttgtattgttagtagagacgaggtttcaccatgttggccaggctggtctcgaactcctgaccttcaggtgatccacccacctccaactcccaaagtgctaggattacaagcatgagtcaccacgcccggccatcacgacttttttttttttttagataggctgtcactcctgtcactcaggctggagtgtagtacagtgatcttcactcactgcagccttgacctcctggtctcaagagatcctcccacctcagcctctcaagtagctaggactacaaatgcatgccaccatgcccagctaattttgtttttttttttgtttttttttttgtagagatgaggtctcactatattgcccagcctggtctcaaactcctgggctcaagcaatccccctacctcagcctcttaagtgctggaattataggcatgagccactgcacctggccactctttttttctttctgtttaaagacagggtcttgctatatagcccaggctggagtggagtggtcattcacaggcatgatcatgtacactgcagcttacaactcccaggctcaagtgatcctcccgccccagcctccccaataactaggactacaggcatgtgccaccacacccagcaagtttcccttagttctctgaaatgttttaagactccactcaaatcttcttaaacagtcttaaattttcatcatgatattacctagtgatttttttttttaagatggagccttgctctatcacccaggatggagtgcagtggtgtgatctcagctcactgcaacctctgcctcccaggttcaagcgattctcctgcctcagtctcccgagtagctgggactacaggtgtgcaccatcatgcccggctaatttttgtattttagtagaggtagggtttcaccatgttggctaggctggtcttgaactcctgacctcaagtgatccacctgcctcagcctcccaaaatgctgggattacaggtgtgagccactgcactcagcctgacctagtgatgttttactcccagttctaatgttccacagttagagactccagacataccaaaatcagttaactttcatgaattcaccatggcccttatgcagtagttttcaacagtggctgcacattagattcactggaggacttttaaaaacactgatacccatgacacatccccataaatgctgttttaattggtctgaggtaggactcagcccttagtacatttctcaagtttccaggacattctataaggattaggttgagaattactgacttggcttctgcattcatatgctcttcttgtccacttgatatagtcctacacatctttcagaacttaagtcaaccttgcctcctctggagaaaatatcctgttaggtgtttttttgtttgtttgtttgttttgagatggaatctccctctgtagcccagtggcggatcttggctcactgcaacctctgcctcccaggtccaagcgaattctcctgccccagcctcctgagtagctggaattacaggcatgcaccaccacgccctgtaatttttgtatttttaggagagatggggtttcaccatgttggccaggctggtcttgaactcctgacctcaagtgatctgcccacattggcctcccaaagtgctggatttacaggtatgggccaccatgtcccacccactgttaggtgcactcttatccctcccctcccagcaccccatagcccctttgaaattcctttattataagtcttgtcataacgctttatcacttgcgctgtttatctttcatgctgtctgatgaactccaggaaagtagaaactaattttagtctagacacctgcttgtggaagttaggcaaacagtcttctgaaagactgtcttgatataaaatcccagatcccacaaaaaaaaacttttttctttacagcaaagcaagtggaaaaaacaaaaacaaaaacaaaaccctttattttttaattgctctatcaatgaaaaagaaaatagagaaatttcccaagggcaaacaattttttttttttttttttgagatggagtgtcgctcttgttgcccaggctggagtgcaatggtgcgatcttgactcactacaacctccgcctccgggttcaagggattctcctgtctcagcctcccaagtagctgggattacaggtgcacatcaccatgccctgctaattttgtatttttagtagagatggggtttcaccatgttggccaagctggtctcgaactcctgactccagatgatccacccacctcagcctcccaaagtgctgggattacatgtgtgagccaccgcacccggcctaataatttttttaagttagcagaatccagagatagaagaactttccctcaatatttttcttcccttccagaatacagagtgattgctgaaaaatagctgccccaccaggaatggcactagcccttgtgactagtttttaccacaaaatgttaaaggaaaaaaatgtgtcgtgttagccaaagagcaatgtgctttctcttttttattagacagggtctcaatctctcacccaggctagagtgcagtggtgctgcacagctcactgcagcctcaaacttctgggctcaagcaatcctccagcctcagcctcccacgtagctggaacttcaggtgtgcaccaccacacctaatttttaattttttgttccagagatggggtcttgctaggttgcccaggcttgtctccaactcctggtctcaggcagtcctcccgactcagcctcccaaagcactgggattgcaggcatgagtcaccatgcccagccagctttctctatttttactttccctttccacctagatgtacatggtgtctcaacattgaaagatactgggtttctgcaccaccaggggaagaaagccaactaaatttagattgttacatgagtaggaaattaactgaaactttgatatgtgtctgttacattaggttacccataaatacacagctagatggaaaagaaatgttactgggatataattttggttaaataggacaccatatgcatttgaaaggaacaaatggctttcctcaacttcctttaactctctcaaaatgcacacctgtggctctttctagatcttctacctcttcaagcactccatacataacactatctccctgtaacttttttttttttaagagacagggtcttgctctgtcacccaggatggagtgcagtagcatgatcatggctcactgcagccttgacctcccaggctcaagcaatcctcccacctcaacctccccagtagcagggaccatagatgtatgccaccatgcctggctgatttttaaatttttttgtaaagatgggtttttactatcttgcccaggctgctcttgatcacttgagccaccccttggcctcccaaagtgctgaaatacagacctgagtacctggacttctccctataattcttttttttttttttttttttttttttttgagatggagtctagctttctgtcacctgggctggagtgcagtagcacgatctcagctcactgcaacctccaactcccaagttcaagcgattctcctgcctcagcctccctagtagctgggattacagacccgcatcaccatgcctagctaattttgtatttttagtagagacagggtttcgccatgttggccaggagttcaaggctgcagtgtgctatgattgccactatgaatagccactgccctccagcctgggcaacatagtgagagtctcatcactaaaaaaaaaaaaaaaaaaatatatatatatatatatatattctttaaaagtttattttgtataaataataatgagacataatttcaccaggctggtctccaactcctgagctcaagtgctgggattacaggtgtgagtcaccgtgtccggccagttttgtttttgtttttttttttaatttcagacagggtcttactctgtcgcctggatggagtacagtggcacaatcactgttcaccaccacctcaacctcccaagctcaggtgatcctcccacctcagccccccaagtagttggaactacaggcacagtgccactatgcttggctaatttttatttttatttatttttatttttgtagataccgggttttgccatattgtccagactggtcttgaacttctgagctcaagcgatctgcccgcttcggcctcccaaagtgttgggactgcaggcactagccatcgcgcctggccagataatggtgattttttttcctaaagaaaaaaagtccaggcccatgtagatttttttcgtattgaagggggcctgcccctccacacctgttggtatttctcgcaaggtggagacaagagactgagaaaaggaaataagacacaaagtatagaggaagaaaagtgggcccaggagacgggtgctcagcaagtgaggatctgcaccggcactggtctctgagttccctcagtatttattgatcactttctctactatctgggcaagggggatgtggcaggactatagggtaatggtagggagagggtcagcaggaaaatgtgagcaaaggacgctatgtcacaaataagtttaaggaacggtgctgtgcctggatgtgcatgtaggccagatttatgtttcactttacacaaacatctcagtgcagtattgccgccagcatgtctcacctccagccataaggcggttttctcctatctcagtaaatagaatgtgcaatcgggttttacaccaagacattccattcccagggatgagcaggagacagatgctttcctcttatctcaactgcaaagaggccttcctctttcactaatcctcctcagcacagaccctttacgggtgtcaggctgggggacagtaaggtctttcccttcccacaaggccatatctcaggctgtctcagtggggggaaaccttggacaatacccgggctttcttgggcagaggtgcctgcggccttccacagtgcactgtgtccctgggtaaccgagaatggagcatggcgatgccttttaccaagcatactgcctgcaaacacatttttaacaaagcacatcctgcacagccctaaatccattaaaccttgagtcaacacagcacatgtttttgcaagcacagggttggggctaaggttacagattaacagcatctcaaagcagaagaatttttctaagtacagatcaaaatggagtttcttgtgtcttcctttttctacatagacacagtaacagtctgatctctcttttccccacaagtaacagtctgatctctctttcttttcccccgcacatatactgacctaaccataagaagtcagtgagactgggaaatatgcatcattgatgcagcctcacaataccccggccccatctgttctctcactactgagaccccaccctgtctcccccttcaccgagatttttttttttttttttttttgagacggagtctcgctctatcaccaggctggagtggcccgatctcggctcactgcaacttccgcctcccaggttcaagcgattctcctgcctcagcctccccagtagctgggactacaggcgcctgccagcatgcccagctaatttttgtatttttagtagagatggggtttcaccatgttggccagtatggtcttaatcgattgccctcgtgatccgcctgcgtcagcctcccagtctgtcccctcaccactactctctttcacggagaccccacccccatctctcccttcaccgactccccgcccccgtctctcgctcacggagtccccgcccctgtctcaaccaagaccgagtccccgcccccatctctccctcgccgagtcgccgcccgcgtctctccctcacccagaccccgccccatctctccctcaccgagaccccgccccatctccccctcaccgagactccgcccccgtctctccctcacccagaccccgcccccatctccctctcaccgagtccccgcccccatctctccctcaccaagaccttgcccccatctccccctcaccgaggctccgcccccgtctcaccctcaccgagaccccacccccatctcgcccttcacccagtccccgctcccatctctccctcaccgagaccccgcccccgtctgcctccctccgggtggctaagccgcacctgaagccgcacctggtcgcagaggctactgctggggaaaccgttgggccagcggcggctaaagggcaggaggcgccgctgtggccacgcgcacttctgattccgctccagggtttcagaaggaactgagggctctggacccggcctcggaggcctgaggagttgggaggggcggcggccgcgtcctccgcaactctggggagaagtcttagtttccgcgcagccaaacgcgattggaccccgccctccggcttcactggggaccgtgggggcggaacccggcgggaggacgtatggggggctggaccatgatggagggagtcggttgggctggacctcgaaatgcctctgctcgctttcctctgcgcttatgccgccatgtacgagtatgcgctgtttccaggtggtttgttatacagcagtagataactgatacatcccttttcactaatatttttatttcctaatacaatttttaaataattttttattttataccaaaaataatagtgaagagggtttttttaaggtcaggatctccctctgttgcccaggctggagtgagtggcgcaatcatggctcccgcccccgtctgtccctcaccgggtgcccgcccccatgtccccctcaccgagaccctcaccactgcagcctccaacccctgggctaaagtgaccctccggcctcaattcctctagtaggtgggactacaggctcgtgacaccacagcaggctaattttttgtggagatagcggttgcactatattgcccaggttggtcttgaactcctgggctcaagggattctcctacctcaacctcccagtttgtaatcagtcttcaaagtgttgggattacagacgtgagccaccgctccaggcctggtttttccacatggattatgtacatgtggcttctcaccacgttgagtcgatgcctgtcaattaagggataactaatcaactgaagactttgtcactcttattgcactcatagggattctcccccatggaaagtctgtcttgacaagcaagcaagtgcattgctacattagaagctgctgccatttaggttgggtgtggtggctcatgcctataatcccagcacatttggaggccgaagtgggcggatcagttgtggtcaggagtttgagaccagcatggccaacatggtgaaaactcatctctactaaaaatgcaaagattagccgggcgtggtggtatatgcctgtaatcccagctacttgggaggctgatgtgggagaatcgcctgaacccgggaggagaagattgcaggagccgagatcatgccactgcaacccagcctgggtgacagagcaagacgcgagactctgtcgcaaaaaaaaaaaaaaaattgctgccattttcagagcacctagactgcttctgccttgtctgaattccttcaaattgagtacgatgaatgctttgccataggttccattatagtcatgacattcataaggcttttcatacacagatattttattctgatagtcatctaaacaaaaactgaattctgtgtaaatattcaacatgcgagtctcatttatggacgacgtgcctacttgtgagacctctctgtgagtaagcatattttgaataggtttagaatgttccccaagttcatgaaactcagaaactctctcctgaagggtggcttctcttgggcatagacaaggagaaccttgtctccaggttcttcccattgtggggtggctcttccatctcatggcctccctgactcgtgctgcggagaaccggcaatcatcctcctgcatcttactctcttccggccagcagattgttttccccaactttattccgctttgcagctatctttttggtgctacatggtcttctggtctgaaatgaattgggaaaagaagtaaatcaggtttttgtttttgtttttgttttttgttttttgtttttgagacagagtcttgctctgtcgccaggctggagtgcagtggcgcgatctcggctcactgcaaccgactcccaggttcaagcaattctcctgcctcagcctcccaaatagctgggactacaggcgcgtgccaccacgaccagataattttttgtatttttagtagagaccaggttttaccatgttggccagcatgttctccatctcctgacctcatgatccgtcggcctcagcctcccagagcgctgggattacaggtgtgagccacctcgcctgaccatcagtttgttttttgtttgtttttttgagacagtgtctcactctgtcacccaggctggagtgcagtggtgcgatcacaactcactacagcctcaaactcctgggctcaagttatcgtcctgctgcagcctcccagtgctgggagtacaggtatgagtcactgtgccaggccttcaaaatttatgtttttggataaaaaatgatgacataatggtgctttgttttgttttgtttttgacacaagatctagctttgtcacccaagctggagtgcagtgacgtgatcatggctcaatgcagcttcgacttcctgggctcagaggatcctcccacctcagccccccaagtagctggaactacagttgcacaccaccatgcccggctaatttttgtatttttggtagagacggggtttcaccatgttgcccaggctagtctggaacttctgagctcaagcgatccgcccgcctcggcctcacaaagtgctgggattacaggagtgagccactgcatccagctcgataatggtgatttttttttaagatttttttttttttttgagacagagtttcactcttcttgcccaggctggagagcaatggtgtgatcttggctcactgcaacctccgcctcccatgttcaagcgattttccttcctcagccgcccgagaagctgggattactgacatgtgtcaccacacttggctaattttgtattttcagtagagacggggtttctccatgttggccaggctagtcttgaactcccaccctcaggtgatccgcccacctcggcctcccaaagtgctggtattacaggcatgagccaccgcacccagctaagaatttttgtttttttaagaataagaaaaaagactccgtctgaaaaaaaaaaaaggaaagaaaaaaataaagtccaggcccatgtagattttttcatatactgacctaaacataagaagtcagtgagactgggaaatatgcatcattgcaatatgcagcctcacaatatctggccctcatctctccctcactgagaccccgcccccgtctctcacctcatcgagaacccgcgctcatccttctctgagaacccgcccccatctctccatcaccaagaccctgcctccgtctgtcccctcgatgactctgctctgcccacccctcaccgagatctaacctctgtctgtcccctcaccgagtgaagggggcctccccctccacacctctgggtatttctcgtcaggtgggatgagaggctgagaaaagaaataagacacagagacaaagtatggagaaagaacagtgggcccaggggacctgcaccgctggctgtctctgagtttcctcggtatttactgatcattatttttactatcttagtgaggggagtgtagcagggcaacaggtggggagaaggtcagcagggaaacatgtgagcaaaggaatctgtatcacgaataagttcaaggaaaggtactgtgcctggatgtgcacgtaggcctgatttaagtttcactttacacaaacatctcagtgtagcaaagagtaacagagcagtattgctgccagcatatcccgcctctagtcacagggcagttttctcctatctcagaattgaacgaatgggaatggtcagtttacacggagacattccattcccaggaaggagcaggagagagaagccttcctcttatctcaactgcaaagaggcctccctctttcactactcctcctcagcacagaccctttaggggtgtcaggctgggggatggtaaggtctttcctttcccatgaggccatatctcaggccatctcagagctttcttgggcagaggtccctgcggctttccgcagtgcattgtgtccctggttaatcgagaatggagaatggcgatgacttttaccaagcatactgcctgcaaacatactgttaacaaggcatcctgcacagccctaagtccattaaactttgattcaatacagcacatgtttctgtgagcacagggttggggctaaagttaagactcacagcatctcaaagcaaaacaatgtttcttaatacagatcaaagtggaatttatgtcttccttttctacatagacatagtaacaatctgatctctctttcttttccccacaactgagtcccgggctccatctcctggtagagtccagccctacagggctttgcgggtgttctccccatgtgtggagatgagagatcataagaaataaagacacaagacaaagagataaagagaagacagctgggccctgaggaccactgccaccaagacgcagagaccagtagtggccccaaatggcggatgcactgatatttattgtatataagacaagggggcagggtaaggagggtgagtcatccaagtgattgataaggtcaagcaagtcacgtgatcataggacagggggcccttcccttataggtagctgaagaagagagggaagacagcatacatcagcattttctttttttttttttttttttcccccgagacagagtctcactctgtcaccaggctgtagtgcaatggcccgatctcagctcactgcaacctccgccctccgagttcaagcgattctcctgcctcagcctcccaagtagctgggattacaggcgcctgccactgcacccagctaattttttgtatttttagtggagatggggtttcaccttcttggccaggctggtcttgaagtcctgacctcgtgatccacccgcctcggcctcccaaagtgctgggattacaggcatgagccactgcgcccggcccagtgttttcttttacgcacttatcagaaagataaaagactttaagactttcactatttcttctaccactatcttctaagaaattcaaagaggaaccaggagtaccggaggaatatgaaagtggacaagaaaagtgaccactgaagcacagcaccacagggaggggtttatgcctccggatggctgcgggcaggcctggataatatccaacctcccacaagaagctggtggagcagagtgttccctgactcctccaaggaaagggagactccctttcatggtctgctaagtaacgggtgccttcccaggcactggcattaccgcttgaccaaggagccctcaagcggcccttatgcgggcctgacagagggctcacctcttgctttcttggtcacttctcacaatgtcccttcagcacctgatcctacacccgcccgttattccttggttatgttagtaatacaacaaagagtaatattaaaagctaatgattaataatgttcatactaatgattgataatgtccatgatcatctctatatctaatttataactattcttattctaactgttttctttattatactgaaacagtttgtgccttcagtctcttgcctgggcacctgggtaatcctccgcccacagactcccgcatcactgagtcccggtcctcctatcctacacggagtctctaccttcatctccacactcagggagactccacctcggtctccgccttcactgaatccccgcccccattgcgccttcactgagacaccagccccatctacgctcacagagaccttaccccgtctccccgtcaccgagaccgctcccccatctcgccctcaccaagtccccgcccccgcctcgccctcaccgagtccccatccctgtctctcccccactgagaccccgcccccgtctcgccctcatcgagtctccgcccccgtcctccgtcatcgagtctccgccccgcctcgccctcaccgagtccccgcccccgcctccccctcactgagtccccatccctgcctctcccttactgagaccccgccctcgtctctcccctcacggagaccccgcccccgactccccctcatcgagtacccgccccgtctatccttcatcaagtctccacccccgcctctccctcaccgagtccccgcccccgcctccccctcaccgagttcccatccctgtctctcccctcaccgagaccccgcccccgcctctccctcatcgagtccccgccaccgtctctccttcatcgagtcccctacccttcccgtcatcgagtccccggccccgtctccccctcatcgagtccccgccctcttctctcccttcactgagatcccgccctcttctctcccctcactgaggtcccgcctctgacagcccctcaccgagtccccgccccccgtctctccctcaccgagttctcgtcccagtctccccatcacctaatccccacccctgtctctcccttacgaagtccccggcccccggttcccctcaccgagaccctgccctgtctgtcatcgagtccctgtctccccctcacctagtccctcttctctcccctcaccgagtccccgcccccgtcgtccgctcaccaagtccccgcccccgtctccccctcaccgagtcccgccctcttctcttccctcaccgagtccccgcccccgtcgtcccctcaccgattcccgcccccgtctccccgtcaccgagtccccgcccccgtctctcccctcaccgattccccgcctccgtctcccctcaccgattcccgcccctgtctctccctcaccgagtccccgcccccgtcaatcctctcaccgagtccccgcctccgtctcccctcaccaagtctccgcccccgtctctcggtcaccaagaccccacccccgtctccccctcaccgagtccctgcccgggtcttcctgcctccacgtggcgaagccgcacctgaagccccacctggtcgcaaaggctggtgcaggggaaaccgttggttcagctgcggttcctgggaagggggtgccgctctgatcacgcgcacttctgattcccctctcggggctcggaagcggctgagggctctggacccggtctccgaggcgtgaggcggtgggagggtcggcggccgcgtcctccacgaccctggggagaagtcccagtttccgcgcagccgacaacggttggaccccgtccctccggcttcactgggcaccgtgggggcagaacccggcggcggcttggggtgggggcgggaccacgatggagggagtctgttgggcgggacctcgaaatgcctctgctcgctttcctctgcattcatgcggcttgtacgaggatgcgctgtttcctggtggtttgttatacggcagtagataactgatacatctctcttcactactttgtttgcgtttttataggtcagggtcttcctctgtcgcacaggctggagtgcagtggctcgatcacggctcacggaaacctccaatccctgggctcaagcgatcttccctcaaattcaacagtagctggaactacaggctcgtgacaccacagcaggctaatttttaaatttttcgtggagatgggaggtcacactatattgcccaggctggtcgcgaactcctgagctcaagcgatcttccctctttggcgtcccaaagagctgagattgcaggtatgaaccaccgcaccgggcccattctcaacatctctcaacaaactgataaagagcatgtaaaaaaatctacagctaacattgtagtgaaatactgaaaactgttctaagctcaggagtacagcaacgatgcccactctcacgaattctatcaagcattgtagttacggccacgcgcggctcacgcctgagatcctaacactttggaaggaagatcgctttgagttcaggagtttgagaccagcctgggcaagatggcaaaaccctgtctcaattttaaaaaatacaaaaattagccaggcatggtgatgcatgtctatagtcccagctacttcggagactgacacaggaggatcacttgagcccggaggcagaggttgtagtgagctgagatggcaacattgcactccagctggggcgacagaggaaggccctgtctgaaaaagaaattggaagaaacattatctacatttcttttctgccattatttacagacaacataattgtctaagtgggagatccaaaagaatctaaattgttacacataatgtgcgggttagcaagaatagtggctaaaaactcaatatgcaaagataattgtcttgtctctctctttttttttttttttttttttttttgacggagtcttgctctgtcgcccaggctggaatgcagtggcttgatcttggcttgctgcaacctccacctccctggttcaagcgattctcctgcctcaggcccctgagtagctgggattacaggcgcatgccaccacgcccagctaatttttgtatgtttttagtagagacggggcttcgccacgttggcaaggccggtctggaactcctgacctcaggtattccgctggcctcggcatcccaaagtgctgggattacaggcgtgaggcaccgcacccggccgacttgtctcttttaacagcaatattacaacagcaataaaataagtagaaataaatacaacaaaaaagtatgcaatatctcttccgagaaatttgtaaactactattgaaagaaatcaaagatgacctagatcaatggatagaccttccttgttgatggattagaagtttcaatataaagacttgaattcttcttacttaatatagaaagttaacaagttttcagtcaaaataacatgtttgatgaggaacctgatctacttataataaaatgtatgtatgtggaggtacaaaatactcctgaagaactgttggcacttaccctacagacattaagaaatagaaagacagggtcgggcacggtggcttacgcctgtaatcccaacactttgggaggccgaggcgggcggttcaccaggtcaggagatcgagaccatcctggctgacacggtgaaaccccgtctctactaaaaatacaaaaaatagccgggcgtggtggcaggcacctgtggtcccagctactcaggaggctgaggcaggagaatggcatgaacccgggaggtggagcttgcagtgagcagagatcgtgccactgcactccagcctgggcgacagagcgagactccgtcgcaaaaaaaaagacagtaatattggtgtagtggtaaataaattaaaccaataaatagaatagaaagccccaaaatacacccttatgaatgaggtgtgttcttggccattatgaataatgctgctataaacgtgggtggtcaaatatctttttgagagcctgttttccattcttttagatatatacccagaagtgggattgctagaccatgtgataataccaattttaattttttgaaccactgccatactggttttcatagctgctgcaccgttttatagtctcactaacagtgcacaggtgggccaggtgtgctggttttcatgcctgtaatcccagcactttgggaggctgaggtggatggatcacctgaattcaggaggtcaggaccagcctggctacatggtgaaaccctgtgtctattaaaaatacaaaagaattagctgggtgtgttgagtcccagctacttgggagactaaggcaggagaatcgcttgaacccaggaggtggaggttgcagtgagccgagatctcgccagtgcactccagcctgggcaacagagcaagactctgtctcaaaaaaaaaaaaaaaaaaaaaaaaaaaaagaattcacaacacaatgactgtgttaacaatgttgttgaagttcatcctaagtttggtaattggggtggccatttgtgttaactaattgcctttatccaaatgaaaaataaaaattcttatatccttttggcaagcaggcagttttagcttataagcaggtgcctaaggaaatagaagtgtgctactgatgcaggtaagtgccatcattggggattcacccaggaaagaattcaactggtggtgctacacaaggatctttcattcactcagagttgctttttccagagtacagctaaaacctatgcagtgtgcccagaatcagcattttgtgctgttggctagctatagttatactcacttttaattacatgcaaattaaggggtgtgccatgcagaactttctagaaaggaggctataacttccaggtgattgttgtggaagtgaatggtaactttcatgttgttgccatggtacttatcaactgtcatggctctggtaggagtgtcttaccctaacaagcaaggagagcaactagagatggcttttggtgccatctgctggttcccggtggcttcttcactttatcctgttgggaccaggaaacaaagtaagtcctacccagtctcctacctcactatggtctgaaggttgtatgttgtgtgtgtcctgcctccacaccaccactccgcaaagccaaatgcttaaatcctaaccgcagaagtgatgaaattaggatatgaggccttagggaggtgattagatcatgagggcggggccttcgttaatggatttactagcaagtttgtccaagtcgccttattttgttgttgttgtcttgttttgttttgttttagacttgtagcagcctgaagccatggtttttagtttctgtttctagtgataagtggaaaagagggatgaggaagaggctttgcaggcccaaccagaaacaaaaactaacaacccataactgtattcttgaacacccctgtatgggattggccgtggagactttctcaccccttctatcatgtgattatgaggtatgaggtaggaaatgtctttgtgtttaaggagggactgttctgaacgtccatgctgattcccactgaagacgttaaactctagagtctgtgggaaaaggaagaagcttaattgaatgtctttcttttttctttcttttttttttttttttttttgaagctgagtctcactctgttgcccaggctggagtgcagtggcgcgatctcggctcactgcaacctccacctccgggttcaagtgattctccttcctcagcctcccgagtagctgggattacaggtgcatgccaccacacctggctaattttttatttttagtagagatggagtttcaccatgttggccaggctggtctcaaactcctgacctcatgtgatctgcccgtctcagcctcccaaagtgctgggattacaggggtgagccaccgcgcacgacctgaatgtctttttttttttttttttgagacggagtctcactctgtcacccaggctggagtgcagtggcgcgatatcggctcactgcaacctccgcctcccaggttcaagcgattctcctgcctgagcctcccgagtagctgggactacatgcacctgccaccacgcccagctaatcttttgtgttttgtttttagtagagacggggtttcactgtgttagccaggatggtctcgatctgctcacctcgtgatccacccgcctcggtctcccaaagtgctgggattacaggcgtgagccaccgcgcctagctgaatgtctttcttacgagccctgggtactgggcttgaaaccacctttgcaaaaattataactgagaaactgattacagggaaagagatctgaccaaactaactgcatcttgcttctaacctccacactgtccttgttcattcctggacataggccaaactaagtttgggatgaacttagtttatagtttaactttgaaacaaaaacaacaataatgctttcccaaaacaaacctccttttccctggagactagactgcctttgcaggactaacacattagccacagataaggaattatggtttaggagtcatgcagctggtgggtgcaatattctggacctccccaaattgctcctggggataaaatcactatcgtaaaacctagaatcagtgcttgagatattttgcagaccctgtgtttcagtgcacaagttgaggccacctagatggataaaccggctcatctggtcttgtggttcccacccaggaactgactcagagcaacaggacaggttccactccctgtgatttcatctcagactcaaccaatcagcacttcccactttcagaccccctattatccttaaaattatctcaaattatccttaaaaaccacgatctcaggccaggtgcggtggatcacgcctgtaatcccagcacattgggaggccaaggcaggtggatcacctgaggtcaggagttcaagaccagcctggccaacatggtgaaaccccgtctctactaaaaaaaacaaatagaaaaattagccaggcgtggtggcggccacctgtaatcccagctactcgggaggctgaggcaggagaatctcttaaacccaggaggaagaggttacagtgagctgaggtggcgccattacactctagcttgggtgacaagagcgaaactctgtctcaaaacaaacaaacaaaccccctgatcccagagttttcagggagactgatctgaataatagtaaaattttggtctcctgtacggctagctggctctgcatgaatgaaactctttctttattgcaatttcctgtattggtaaatcagctctaggcagttaggcggttacaagcttggtaactcatgcctataatcccacactttgggagcccacggcaggaggatcgattgaggccaggagttagagccaagcttgggcaacatagtgacatcccatctctacaaaaagaaaaaaaaatagctgactgtggtggtgggcgcctgtagtcccagctactgaggaggctgaggtggaagaatcacctgagtccaggagttccatgctgcggtgagctatgattgtgccattgcacaccagtctgggtgacagagtgagactgtctctaaaaaaaaggaaaaaaaaagaaagaaaatccatcagcagatagctcttggatctaccttcactttagcctcagaccatgccacaacccctctgttctcccctgctaccaactttccaaaccactttcttctcatcgggattattgccttaactttccaattacgctccctgattctacctttgattcccaagagttgtacaaatgacagacagatattcttaaaatatatatcagataatattgctccagtagctcagacccttctatgactttgcattgcactcatagtaaaacccaaaatgtttagttgttctcatggccccatatgatctgactgataattgacttccttcctgctagtctccatcctacccaactcacttaaaccatttcagacacagggcttctgctgttacagaagcattgtcctgccttcctgcctcagggcccttgcacttgctgttctgtctttcctcagaaattgacagacatcccctaaattccttcagtcatttcctggagatgaagtggaaatactgtgtgtagatgactctgagtcccagttttctcatctgtcaaactgttgttccatccccatcccagcttggaaaaggcttttttttttttttttttttttttttgctggccccttgctctgttgcccagactggagtgcagtggcacgatctcagatcactgcaacttgaaccctcgtgagttcaagcaattcttatgcctcagccacaggaatagctgagattacaggcgagcaccaccacaccagctaatttttgtactttttttttttttgagattgagttttgctcttgttgcccaggctggagtgcaatggcactatctcggctcactgcaacctctgcctcctgggttcaggcgattctcctgcctcagcctcccaagtagctgggattacaggggcccaccaacacacctggcaaattttttgtatttttagtagagatggggtttcttttttttttttttttttttttttttgagatggagtttcactttgtcgcccaggctggagtgcagtggcgcgatctcggctcactgcaagctccgcctcccaggttcacaccactctcctgcctcagcttcctgagtagctgggactacaggcgcccgccaccacgcccaggtaatttttttgtatttttagtacagacgggatttcactgtgttagccaggatggtctcaatctcctgacctcgtgatccgagcaccttggcctcccaaagtgctgggattacaggcgtgagtcactgcacccggccaagatggggttttatcatgttgaccaggctggtcttgaactcctgacctcaggtgatccacctgcctcagcctcccaaagtgctaggattataggtgtgagccactgtgcccagccaattttcgtacttttagtagagacgaggtttgaccatgtttgccaggctggtctggaactcctgacttcaggttatccgtccacctcagcctcccaaagtgctgggattacaggtatgatgaaaatgctttttcaagtgataactttccaatagggaaggaaggtttaaaggtaagtttcaaaaagcacctgcttgagatgaaatgtaataccataggtctccagaagacaacagcgcatcacttggtttgccttataaatccttaattctcaaaacacaggaattaagagaaacagcgaacatttgtagacctcttcacccttcgttagggggaaagtgaaaataactatttgctgggcatctcttgttcttttctatttttattattttaattgatgtcccattccaggatgttgggcatctattgtttcatctggacactattttatatctgtgatctactttatttatttattttcctttttttttttttaagagacggagtctccctctgttacccaggctggagtgcagtggtgtgatcttgattcactgcaaactccgccttccgagttcaagcaattctcctgccacagcctcccgactagctgggattacaagcacgcaccactatgcccggataactttttgtatttttagtagaaacgaggtttcaccgtgttagccaggctggtctcgaacccttgacatcaagtgatccgtccgcctcggcctcccaaagtgctgggattacaggcgtgagccaccgtgcccggcctattcatttttcttttttctatttctttttttttttatatagagaaggagtctcagtctgtcacccaggctggagtgcagtggcgccatctcggctcactgcaacctccgcctcccaggttgaagcgattctcctgcctcagcctcccgagtagctgggattacaggtgtgcaccaccacgcgcagctaatttttgtattttattgggtttttggtttgttttgtttcgtttgagacagagttttgctcttgtcgcccaggctggagtgcaatggcaccatctcggctcactgcaacctccgcctcccggattcaagctattctggtgcctcagcctcccaagtagttgggattacaggcgcccgccaccacgcccaactaattttttgtatttttagtataagcgggtttcacaatattgttcaggctggtctcgagctcctgacctcaggtgatccacccgcctcggcctcccaaagtgctgggattacaggcttgagccatcgcgcccgggctatttatttttctttttttaattttaattttaatgtttcatagagacagggtctccccatgttgcccaggctggtctagaactcctgggctcaaaggaccctgcctcaacctcccaaagtgccaggattacaggtgtgagcgactgcgtctggcctacatttgtgatttaaatcagcacatttctcatctctcagaactcctcaataaccatcggttggaaaaaagagcaaaaaacctaaatgtatttatatgtaatctctaggagttaacctcaccgaaagatacaaccgatttaagaagaaaatgttaaaactctcttcaagggcctatagaagaaacgggatgaatggaaacgtgattcactctgtggactggcagatacctctggaaatctggtgttctattgtaataagttctcgggaaggtagagacttttatttgggacatagaggcttggccaaccagaatggaggacccacccaagtcccgcccccaagcctgagccctctcctttgctccacccactctgcctgaagtcccctcaacccctccgacttcgcagtctcccagcccggccttctggggctggtcttcattggaagccacgcccccaggtctgtcggataaacattttacaacctattctctctgaagtctagtacctggaggcttcctctggaaataagaacttgggtctcccgcctggccaacatgacgaaaccccgtctctactagaaatacaaaaattagccggtcgtggtggcacacacctgtaatcctagctactcaggaggctgcggcaggagaattgctggaacccggtaggcgcaggttacagtgagctgaggtcgtgccactgcactccagcctgggcgacagagcgagactgcgtctccgaaaaaaaaaaaaaaaaaaattagccgggcatggtggcgggcgcctgtaatcccagctattctggtggctgagccaggagaatcgcttgaacccgggaggtggaggttgcagtgagccgagatggtgccattgcactccaggctgggcaacaagagcgagactccatctcaaaaaagaaaaaagaaaaaaaaaaaaaagaacttgggtctccacaacctcaagcctcctctcaaaaaaagaaaaaaagttttaatctccctataagctggaatccccactcccaccccaccccagctcccggtttgagctgtcctgccattctggaacaaatgaatgtatttcttttcctttttttttttttttttttttgagacggtgtctcgctctgtcacccaggctggagtgcagtggtgccatctccgctcactgcaacctccgcctccctggttcaagcgattctcctgcctcagcctcctgagtagctgggataactggcgcgtgccaccacacccggctaattttgtatttttagtagagacggggtttcaccatcttggttaggctggtctcgaactctgacctcatgtgatccgcccacctcggcctaccaaagggctgggattacaggcgtgagccaccgcgcccggccaatatatttcttaaatgtatttgattgaagtctcatgtctccctaaaatgtacaaaaccaactgcaccccagtcaccttgggcacatgttctcctggcctcctgagggctgtatcaccggccatggtcactcatatttggctcagaatgaatctcttaaaatattttacagagtttgacgcttttcgtcgacattgcttaggctggcatcgaattcctgggctcaagctgtaattgccggagggttcttcctgcccactgcataaagaaagacaatggcattgtagtaaaggaagagtttagtggacatgaggctggccatgccacgtgggagtcgaagttcctactcaaatcatctcaaagctcctaggttaggggttttccaaagacagtttgggggaacgggtggggatggcagagtaacaggtgcttgctgctgattggttggggcagatgcaatcataggggggtcgaagccttcctcctacaggctgaatcgattttgggtggggccataggagcagggttgacgggtccatgaggagtgttaggtgtcagacatgcaataaaacctgaaagggtatctccaaaggccaatctggggttctgcaatagtggtgttatttgcaggagtaattggggaagttgcatatctcataacctctggaatagtggctgacatacatttctgcgcctttgcaggaatcaggctcctctcctgctgatggctccccattagttttaccaaagcgattgagttttaggcaaagcttattatcacctaaactatagcctaaatgtttcttaaagttacctcagcccaatagcccaggaaatattaagggaaagggaagatggggggtggattggctcagatctctttcactgtcataattttctgatatatatttttttgagacagggtctcactctgttacccaggctagagtgcagaggtgcaatcacagctcactgcagcctcgacctccccaggctcaaatgacctgcccattctggagttcattcagcctcacaaaatgttggaattacaggcgtgagccacctcgactgtcctgattattatttttgcaaaggcaatggttgacaaagagtcaaactctgtaaaatatttgaagagatttattctgagccaaatatgagtgaccatggcccacgacacagccctcaggatgtcctgagaacatgtgacaaaagtggttggggtgcagcttggttttatatattttagggagacatgagacatcaatcaaacacatttaataaatacattggcttggtccagaaaagcaggacaactcaaagcaggaagcttccacgctataggtaaatttaaactttttttttttttttttttttgagatggagtttcgctcttgttgcccaggctggagtgcaatggtgtgaactcggctcaccgcaacctccgcctcccaggtgcaggcgattctcctgcctcagcctcccgagtagctgggattacagacatgtgccaccacgtccggctaattttgtatttttagtagagacggggtttctccatgttggtcaggctggtctcgaactcccgacctcaggtgatccgcctgcctctgcctcccagtgttgggattacaggcgtgagccaccgcgctcggccatatgtgcaatttattacatgttaattatacctcagtgaagctgtaggggctgggcatggtgagtagttcacacctgtaatcccagcactttgggaggctgtggcaggcagatcgcttgagcccaaaactttgagaccagcctgggcaatatggtgagaccccatctctacaaaaaaagaaaaattagctgggcatggtggcatgtgcctatagtcccaggtacttgtgtggctgagagggtaaggaacactacagccctggaggtcaaggctgagatgagccatgatgcgctctggcctgggcaacaaagcaagaccctgtctcgaaaaaaaattttttctttttttcctaaagaatgtgtaggccaagttaaccctccagacaggtaagaatgtgatatgtgtcatagcctgtaatttatacaataacatcaaggctgctttggtccaagggcaggatctatggcgagtatatgttcttacacaagaacagtaaataaagtagaaatcctggctgggtgcagtggctcatgcctgtaatcccggcactttgggaggccaaggtgggcggatggcttgagcccaagagttcaagaccagcctgggcaacatgacgaaaccctatgtcttaaaacaaaaaacaaaaaaaaacaaaaaaccaccaggcatggtagtgtgcacctgtagtctcaattacttgggaggctgaggtgggaggattgcttcaacccaggtgagggaggttacagtgagtcgagattgggccagtgcactccagcctgagggacagaataagactctgtctcaaaaaaaaaaaaaaaaaagtaggtggggcacagtggctcatgcctgtaatcccagcactttgggaggccaaggtgggtggatcacctgaggtcaggagtttgagaccagcctgaccaacatggtgataccccatttctattaaatacaaaaaattagctgggtatggtggtgggcacctgtaatcccagctactcagaaggctgtggcaggaatctcttgaaccttgggggcagaggttgcagtgagctaagattgcaccattgcactccaacctgggctacaaaaacaaaaactccgtctcaaaaaaaaaaaaaaatctagaaatgttggagttgttctcaggacttgggttaagcagaagtcaagatggcagttggcatccaagatggagtcatgattgccttcacagcccctaatagggcccagttactgggcctcccttcagatactattgcatggcagcatggcagctttatatcctgggcaagattgtggagtaaaattactcaggttctactttaccagctatgttgctttgggcaacttaacttctctgtgcctcagtgtcttcatctctacctccctcagtgggctgcttataggagtccatgcatgaaggactgagcacagtgcctgccacataagaagcactcagtaggctgggtgtggtggctcacgcctgtaatctcaccacttcgggaggctgaggcaggaggatcgcttgagccaagcagtttgagaccaacctgggcaacacagtgagaccacgtctttacaaaataataataataataattctttttaaaaattagccaggtgtggtggtgcatgcctgtattcccagctgctggggaggatgaggtgggaagattgcttgaacccaggagttcgaggctgcagtgagctacagtcacaccactgcactccagcttgggtgatggagtaagaccatgtctcaaaataaataaataaaaataaaataataatgtcagctattgtgattatgctttgccttcattggagggcagtcctgaagcccccagccccttatctgggagaaggcaatgattaggggtggggaggttccaaaaggggagaagctctgtctgatgtcccatcaccccatcaccccttggggcaaggcccatgttagaggtcactaaggcagaatgaattctccatagggtaagcccaggaagaagacacctgtaaccagtggtatgccacagctcaggagagccaaatgctgaatcttcaactattttgtgagccagttgttaaactgttggtagcttgaaaccagctgtggtgagacagtgtttacaccatagtaatctgcaaatgctacagatcagggccttcttcccccacctgctagcactgcctgtaaacacttacctgcttcaaaattaatgcctgctggccagttgcagcggctcacacctgtaatcccagcactttgggacgctaaagcaggcggatcacttaaggccaggagtttgagaccagcctggccaacatggtgaaaccccatctcctaaaaatataaaaattggctgggtgtggtggcatgtgcctgtaatcccaggtactcaggaggctgaggcaggctgcagcataaaccttggaggcagaggttgcagtgagctgagatcgcaccattgcactccagcttaggtgacagagtgagactagcatctccaaaaaacaaacaaaaaaactaaaacgaatgcctgctgctccctcccttccaactggaaaggcagagaggaaaaagaaaggaagcttttttgccctagagttgttccaggttggggcatcggcaatgcacttccagaaccacctgcagagtccagcacagggctggtgttgagtcaccctcatgttctcccaaactgaccccagctctccagacactctctgcaagcaaaacaaacctcatttccctccttgttcccacaggctctgagacttcaccaatctctgtttctacctggttcaacccagccccctgatgtcctgggctggagctgctggggtggtcacagcattggacaatcagaccttgactagggccacatcaggggcacactcatagcctagtcctcatgtggccagatggagaaggaatttcaggtgaggtggctcatgcctgtaatcccagtattttgggaggccaaggcaggaggatcatttgcactcaggagttagagaccagcctgggcaacacagtgagacccccatctctacaaaaaataaaaagtagctaggtgtggtggcacattcctgtggtcccagctacttgggaggctgaagtaggatggcttgagcccaggagttcgagaccagtcttggcaacatagggagactcctgtctctgtctgtctacctgtctgtctatctatctatctatatttatttttgaaacagagtctctctctgttgcccaggctggagtacagtggcacaatctcggctctctgcaacctcctatctatctatctatatttatttttgaaacagagtctctctctgttgcccagactggagtgcagtggtacaatctcggctctctgcaacctcccactccagggttcaagcgattctcctgcctcagcctcctgagtagctgggattataggcatgtgccaccaagtccagctaatctttgtatttttagtagagacggggtttcaccatgttggccaggctggtctcgaactcctgacctcagatgatcctcccgccttggtgtcccaaagtgctgggattacaggcatgggacacaccgtgcctggccccatctctatttaaaaaaaaaaaaaaaaaaaaaaaaaaggttgggcgcagtggctcacacctgtaatcccagcactttgggaggccaaggtgggcagatcacaaggtcaggagtttgagaccagcctgaccaatatggtgaaactccaactctactaaaaatacaaaaattagccaggcatggtggcacacgcctgtattcccagctacttaggaggctgaggcaggagaatcatttgatcctgggaggcagaggttgcagtgagctaagattgcaccactgcaccactccagcctgggcaacagatcaagactccgtttcaaaaaaaaaaaaaaaagagagacagaaagagaaggaatttctactgcaactctgagtgggaagagcatgggaggaacatctctggctcttctctgatgggtaagcttggaataagaaaccaagtgtacccagctcagctctcttctccaacctggctctaagcaccagaggaggcacctgggcctgctgagcaggtggtgaacccacagagccggggcttagccacacacagcaacgctcatctcacgggtaggcactcacacttataatctgacacctgcatctttcaagtggttcagactcgaaaggcaggaaaaggtggtgttacttactgaacccctaaagcctgagccacctgcaaggccctgcccactcctgtccccattatctccttttgttttattttttttttttttgagacagggtctcactctgtcacccagtctggagtgcagtggtgatcacagttcactgcaacctccgagtcccaggcttaagcaatcctcccacctcagcctcctgaatagctgggataccagctgggtagatgcacaccaccacacctggctaattttttctgtagagacagggtttcaccatgttgcccaagctggtctcaaactcctgaactcaaagtgattcacttgcctcagatgtcccaggttggccttaaactcctgggctcaagtgatccacccacctcagcctcccaaagtgctgggtttacacatgtgagccaccatgcccggccctgacctcaacttcgacagctcttacccctgctcactctgccacacaaccttctttctgtttctggaaaatgccaagttcattctcatcttagcagtgctggcctttcctcttctgccctagctcttctgatctttgctttctcttcacctctcagatctcagcacagaggcctaccgtgctcactcaaccatgcaagtatgcctccatcacgtgaccctggtgtactggctcagagtctccaaaattacaacatggtggccgagcgcagtggctcacacctgtaattccagcactttgggaggccgaggtgagcagatcacgaggtcaggagtttgagaccagcctgaccaacatggtgaaaccccatctctactaaagatacaaaaattagctgggcgtggtggcgggtgcctgtaatcccagctacttgggaggctgaggcaggagaatcacttgaacccgggagacggaggttgcagtgagccaagatcgcaccactgcactccagcctgggtgacagagtgagactctgtccccacacaaaaaaactaaagcatggactggcttacctgtttgttgtcctgtcttctcctctatgagatctacgagggcagggtcttgtcagttttgttcactgtggtggcccagtttcccagaacctagaacagtgcctgcaaaatagcagaagctcaagaaagattggttgaatgaataaactgaatacttctcgggaaaaaaaaatgatttttttctttaatagtaaaataatatacgtcttggaaaatacagcatacaaaatacagaaaatataattgagcacttttatgagcatatcgatcattgaatcgcgagtctgcatcgcctatctctccgcgtctcttgcgtgcgtgtaggtatataaatggtgtataggcttgtgggtgtgcatgcatagacagtccttcttgggtactcataagggggctcagaccctcaggtgcccctgagtcttaaccccaccccttcttcatccgtcctgttcctgaagacgaccatgaaggtgactcttcattgagagcctctggaggctgggagcttttagagtaaggctttgcaatgtaaccgtgaggtagctatgatcatccttatttccagatgtgggaactaggcttcccagaggctgatgatatgaccaaggccacacagctggcaaacagtgattccaatggtctggaggtccctaggcctctgttctctcaacctggggctttcagtttcctcaagtctgattatctgccctcttcaaggtgctgctcagagggtctggggctcaatgatgaaaactgggatgggtcccaagggcaggtggagtagttacatccaccagtccatagactctttggggcaagccctgacgatgaccatacagtggggcagccccttacacaggatcttctccgcctcctgaccctcccaccccagcccctgcagctcaaggactctgagcttgggcatagtgaggcaggaggagaggatttcagtgggggagggcatttctggggtgacgaggggaccctgcaggcacagactctccagggccggcattccctccagcacagccaggccaggggcagagaggcccctcacggtcagccggatcttgcgcacatctcggaggtggcggctgatggccagcagggtgctgtcggcagacagggtgcagcccagcacctcaagcctctgcagatagctgagctcctgcaggccagcatccagccctgtctcggtcacacggtaggtaccacccagcaccagcgagcgcaaggcccggaagcgcgtcaggccctgcaggtgctcgtcacggaaggcggggacgcggtccagcacgatgcattcaagcaggggcagcacggtggggtcctgctgcttgtggagccaggccatggagatctcgcagctgtgcagctccagggtcctcaaggtgctgggcaggctggtgatgggcaccatgctcaggtcggccacgtgcaggcagaggcgcttcaggttggggcacttctggcccagggctctcaacagagcaggggacaactggggggcctgggagccagagaacaggtagccacccatccgcagggaatggagccgggatgccatgtaccttcgaaggaggtgccacatgactttaggtcgcatctgtaagagccagagattggggtgacagagtgagaggtatggagcttccaaggcccctgctgggctggagacacacaaccccggggtgggggattctggtgccctgctgggcttctgcccttgcctagccagtctcctccccaggttcaacctccccaggttcaaccagatggtttgagtgcaccatcttgcctgctagggctttgaacaaatctttttttttttttttttttctgagacaggttcttgctctgtcacccagtctacagtgcagtggtgagataatggctcactgcagcctggacctcctaggctcaagtgattctcccacttcagcttcccaagtggctgggacttctgacacatgcccagctaatttttgtgatttttagtagagatgaggtcttgctatgttgcccaggctggtctccaactcctggattcaagcaatcctcccatctcagcccctcaaagtgctgggtctacagtcgtgagccactgcactcggccacttagaataaatctggtaggggctgggcacagtggctcatgcctgtaatcccagcactttgggaggctgaggtggatggatcatttgaggtcaggagtttaataccagcctggccaacatggtgaaaccatgtttctactaaaaatacaaaaattagctgggcgtggtggcaagcacctgtaatcccagctactcaagaggctgaggcaagagaatcacttgaacccaggagacaaaggttgcagtgagtcgatatcgcaccactgcactccagcctgggcgatagagtgagactctgtctcaaaaaaaaaaaaaaaaaaaaaaaaagataaatctggtaggggaaaaaaagatactaacagaatctatctttagcaataaatttttaccgttttttctggactaagaaaaagagcagagcaacccattgatattttacccctttcttaatgatcacctccagtagaaataagcaacacagaataaaattttaaaagccgaaaactacccagagtaaattaggtctatgttaaaaaaaaaaaaaaaaaaacaacaaatgaaaaggctgggcacggtggctcacacctgtaatcccagcactttgggaggccaaggcgggcagatcacctgaggtcaggagttcaagaccagcctgaccaacatggagaaaccccgtctctactaaaaatacaaaattagccaggtgtggtggtgcacgcctgtaatcccagctacttgggaggctgaggcaggagaatcacttgaacctgggaagcagaggctgcgatgagccaagatcgtgccgttgcaccagcctgggcaacaagagcgaaactccatgtcaaaaaaaaaaatatatcaaagcctggtagagtggaagctgcaaaaatcaaccctgggaagttagacttagtagaaaataaaaaatatatataattgatagcactgggcatttcattctaagtacagtttatcttaaaaagaaaaagttagcatgcttacatctgccttttattgctggatttctctacttggcatcatagggcctaatggaaaaaggaaaattgtctaataacatattctttatgtgtgcttacaaaggtgtttcttttcttttctttttttttgagacggagttttgcttgttgcccaggctggagtgcaatggcacgatctcagtcaccgcaacctccgcctcctgggttcaagcgattctcgtgccttagcctcctgagtagctgggattacaggcatgtgccaccatgcccggctaatttttttttttttttttgagacagagtctcgctctgttgcccaggctggagtgcagtagcgcaatctcggctcactgcaatctccacctcccaggttcaagcaattctcctgcttcagcctcccaagtagctggtactacaggcgtatgccaccatgcccggctatgttttttttgtatttttagtagagacgcggtttcaccatgttagccaggatggtctcaatctcctgacctcgtgatccaaccaccttggcctcccaaggtgctgggattacaggcatgagccacgcgcctggccttaattttgtatttttagtagagacagggtttctccatgtaggtcaggctggtctcaaacacccgacctcaagtgatctgtccacctcggcctcccaaagtgctgggattacaggcatgagccactgcacccggccaaaaaggtgtttctacatcaaactcttccattcactgaagaaaatagcttatcatcaatccttcagaaagcatgcttacatttgccttttatacatgcatatatatacccatgtaatacaaactgtattagtctattttcatgctgctgataaaaacatacctgagactgggaagaaaaagaggtttaattggacttacagttccacatggctggggaggcctcaaaatcatggcaggaggtgaaaggcacttcttacatggcggcagcaagagaaaatgagaaagaagcccgggcgcagtggctcatgcccataatcccagcactttggaaggccgatgcgggcggatcacgaggtcaggagattgagaccatcctggccaacatgacaaaaccccgtttctactaaaatacaaaaaaaaattagccgagtgtggtggtgcatgcctgtagtcccagctactaaggaggctgaggtaggagaatcgcttgaacacgggaggcagaggttccagtgaactgagatcgcaccactgcactccagcctggtggcagaacaagactccgactcaaagaaaaataaataaattaatttaaaaaatacaaaaaattagctcagtgtggtggcacgtgcctgtagtcccagcttctcaggaggctgaggcaggggaatcacttgaacccaggaggcagaggttgcagtgagctgagatcataccactgcactccagcctggcaacagagcaagactccatctcaaaaaaaaaaaaaaaaaaaaaattaagaaaacgagaacaaagcaaaaatggaaacccctgataaacccatcagatctcttgagatttattcactatcacgagaatagcatgggaaagaccagcccccaagattcaattatttcccctgggtccctctcacaacacatgggaattctgggaaatacaattcaagttgagatttgggtggggacacagccaaactatatcattccaccccggcccctccaagtctcatgtcttcacatttcacaaccaatcatggcttcccaacagtcttccaaagtcttaactcatttcagcattaacccaaaagtccacagtccaaagtctcatctgagacaaggcaagtcccttccacctatgagcctataaaatcaaaagctagctagttacttcctagatacaatgtgagtacaggtattgggtaaatgcagccattccaaatgggagaaattggccaaaacaaaggggttacagggcccatgcaagtctgaaatccagtggggcagtcaaattttaaagctccaaaattatctcctttgattccaggtctcacaaccaggtcacactgatgcaagaggtgggttcccatggtcttggccagctccgccccttgtggctttacagggtacagcctccctcccagctgctttcacaggctggtgttgagtgtctgaagcttttccaggtgcatggtgcaagctgtgggtggatctaccattctggagtctggagaacagtggccctcttctcacagctccactaggcagtgacccaatagggactctgtgtgggggctctgaccccacatttcccttccacactgccctagcagaggttctccatgagggccccacccctgtagcaaacttttgcctggacatccaggcatttccacacatcttctgaaatctaggcagaggttcctaaacttcaattctttttttttttttttgagatggagtttcgctcttgtcacccaggctggaatgcaatggcacgatcttgagtcactgcaacctttgcctcccgggttcaagcgattctcctgcctcagcctcccgagtagctgggattacaagcatgcgccaccacgcatttgttgtatttttagtagagatggggtttcaccatgttggccaggctggtcttgaactcctgacctcaagtgatccgcctgccttggcctcccaaagtgctgggattataggcgtgagccactgtgcctggccctgaacctcagttcttggcttctgtgcaccagcaggctcaagaccatgtggaagctgccaagacttggggcttccaccctctgaagccacagcccgagttatacgttggcccctttcagctacagctggagcagctagggcacaggacaccaagtcccagggtgaacatagcacagggaccctgggcccccaggaaaccactttttcctcctgggcttccaggcctgagatgggaggggctgccgtgaaggtctctgacatggcctggagacattttccccatggtcctaattaggttccttgctacttatgcaaatttctgcatctggcttgaatttctccctagaaaatgggtttttcttttctatcacatagtcaggctacaaattttccaaacttttctgctctgcttcccctataaaactgaatacctttaacagtacccaagtcacctcttgaatgctttgccacttagaaatttcttccactagataccctaaaacatctttctcaagttcaaagttccacaaatctctagggcaggggcaaaatgccatcagtctctctgctaaaacataacaagagtcacctttactccagttcccaacaagtttctcatctccatctgagaccacctcagcctggaccttattgatcataccactatcagcattttgggcaaagtcactcaacaagtctctaggaagttccaaactttcccacattttcctgtcttcttttgagccccccatactgttccaacctctgactgttacccagttccaaagatgcttctacatttttgggtatcttttcagcaacgccccacttaccgctaccaatttacagtattagtctgttttcacactgctgctaaagacatacctgagactgggaagaaaaagaggtttaattgaacttaagttccacatggctggggaggcctcaaaatcatggcgggaggtgaaaggcgcttcttaacatgttgatggcaaaagaaaatgagaaagaagcaaaaaaggaaacccctgataaacccatcagatcttgtgagacttattcactatcacaagaatagcatgggaaagactggccccatgattcaattactttccccgggtccctcccacaacacgtgggaattctgggagatagaattcaagttgagatttgggtggggacacagccaaaccatatcatgaaccaagagagaaagaaacatgttttaatgaatcttctcaggcggctgaggcaggaagatggcttgagcccaggagatggaggttgcagtatgttatgattttgccactgcctgggtgacagagtgagatccatctcaaaaaaataaattagaaaaagataaactgcagagcataaatgttatgggctacttttgacagaggaatcaaatcttccttgccaaatttagacccgtgtgggtcagcagaaattgactagaaatagtggccaccgaatggtaactcacaagggtagcagttaaagttggtaaaattttaaatgcacacaaaaccaatggacgaatcaacttttcctcgcaaaaccaacaactaagtttcaacaactgagaaaaagtttcatattatcaggccagacactgtggctcacacctgtaatcccagcactttgggagactgaggttgggggacagcttcagtccaggagttcgagaccatcctgggcaacatagcaagactctgtccttaaaaaaagaacttcaaaagcaactgtattaaagggagttacagatggatatatacagtaaaattgtttaaaagtagaacactatctaaatagtagaacagcattacccgaagttcagaaatacattactaacactataattgtttttggacacacacatatgaagtaacgtaaaaggaagggtgcaaattcactttataatagcaattatctatgaagacagtttcaaaaagggcaacaaatatatctataaatgttttgagccagttgctgtggctcatgcctgtaatctgaacactttgggaggctaagtcgggagaatcacttgagcccaggagttcgagaccagcctgggcagcatagtgagactccgtctctacaaaaaataaaaaattagcaggtgtagtggcgagcgcccgtggttccagctactcaggaggctgatgcgagaggatcgcttgagcttgggaggtcgaggctgcaatcgcaccactgcactccagcctgagcagcagagcgagactctgtctcaaaaacaaaacaaaaacttgataacatagtcataaattagcatttatcgaatgataaatatgtgccagactgttctaagccctttccctgcgtgatctcagtgaagtcccataatagccccgtgaggcaggtactgtcctttatccccattgcagggatgaggaaattgaggccctgaggtcgaagaggagctggtaagcgatgatgccgagataggccccggatcgcctggctctaaatccccagcccgggccccgacacacagtcccagggtgggagaggtggtcttcggggtccgggcaccgcgaccgcggcccaggcccgcccggccagctgcgcgtaccgtgtagagcgtcaggtcgacatgtcgccacagccaccggtcgtccaccagcctcttccagcggtgacagaccctgggggaggggacgcgcggttagaacgaccccagccccgggccacatcgcatctccaggtgccagctgcgccctccgccctgcccttccccccggaggcggggccgcacctggagatgcggatccggtcccgtaccgggaggtaagagaagatctcgagcaggaccgagtccggcagttcgaccaaagtcgccatgatcccgccgacacgcacttccgcttccggttaaagagacccgaggggtcctgggggcgccgaggcggctgacagggcggcggccgcgaccttcccgtagccggtcgagaaatttgaccttcctctcgctgggaagtgattcggtcccagggccggaccagccgcggatggggaccagaaaccagcctggaaagcgtggctgaggcagtgagaggcttgcgggaggtggctgaggcgtgatttggccgcgactgggaactaagaccaagtccagaaggcggggctggagtgaggcgaagctcggaggcggggctagagacgaggaccaagtccggaaggcgtggccggggtggggtgaggatcggaggcggggctagagaccaggaccaagtccggaaggcgtggctggggtggggcgaggatcggaggcggggctagagacggggaccaagtccggaaggcgtggctggggaggggcgagacccggggacggggctagaggcgaggcccaagcccggaaggcgtcgctggagttgggcgaggctcaggggcggagccagagaacggaaccaagtccagaaggcggggctggggcgcggctagggggcggggctagagacgaggaccaagtccagaaggcgtggctggggtggggcgaggatcaagcccggaaggcgcggctggagcggggcgaggcctaggtggggctgcagacgagaaccacgccttggaggcgtggctagggcgggtagaggctcggacaaccgctggaaggcggggctggggcggggcgagaccttgggggcggggttgacgacgaggacctagccgagaggtcgtggtctggacggaaaccaggctgcagcaggaccaggcgccaagggcgtggctggggagcgatggagacgctcggaaggtggggagcgggggacggagacagggagaagactacgccatgaaggcgtggttgaggcggggcgaggcctgtgggtctggccccgagcgaatggcttggtagagagtcagagaactctatttttttacttaatgatgcttcttgatgtctatgcacaaggataaatttgtattactggaatatcgtggccaaaggacctgttgaatttttcactttcattgatactacagatattttctgaattggcaagtccaccaagaaactataaaaatgtgtgtgtgcaatggctgcacacagcagcttccttggtagtgtacgcagcctgttggttgtatgggttgctctaagggaccttggagacaggcctttccgatggatgttcatgtttctaaccttgcactaccacaatgtaggctccaaacaggcatgtgaggtgcctttggaaagccccagggcactgtggccagggttgacattggccaagttatcatgtccatccgcaccaagctgcagaacaaggagcatgcgattgaggccttgcgcagggccaagttcaagtttcctggccgccagaagatctacatctcaaagaagtggggcttcaccaagttcaatgctgatgaatttgaagacatggtggctgagaagcggctcatcccagatggctgtggggtcaagtacatccccaatcgtggccctctggacaagtggctggccctgcactcatgagggcttccaatgtgctgccccccctattaatactcaccaataaattctacttcctgtccaaaaaaaaaaatgtgtgtgtgtgtgtgtgtgtgtgtgtgtgtatatatatatatatatatatatacacacacacacacacacgcacgcctcctgaagccaggaggcggagattgcagtgacctgagatcgcgccaccacactccagcctgagtgacagagcgaaactccgtctcaaaaaaaaaaaaaaagaatatgaaagagattgtggaggttgcagtgagcccagatcgcgccactgcactccagcctgtgcgacgggtgcgagactccatctcaaaaaaaaaaaaaaatcatgttactgcaaaggacatgatttcattatctttttttttttttaaatttgggacagggtctctctctgtcacccagtctggagtgcagtggcgaaattatagctcactgcagccttaacctctggggctcaagtgatccgatccttccacctcagtctcccgagtagctgggactgtaggcacatgccaacacgcccggctaatttttgttttgttttttgagatgaagtcttgctgcatcacccaggctggagtgcagtggcacaatctcggctcactgcaacctccgcctcccaggttcaagtgattctcctgcctcagcctcccgagtagctgggactacaggcgcccgccaccatgtccggctaatttttatgtttttagtagagatcaggtttcactatattggccaggctggtctcaaacttctgacctcaggtgatccacctgcctcagcttcccagaatgctgggattacaggtgtgagccactgcgcccggctaatttttgtatttttttctagagccggggttttgccatgttgctcaggctggtcttgaactcctgggctcaagttcttcctgcctcagcctcccaaagtactaggattacaggcgtgagccaccacgcccagctgattgcattttttttatggctgcattacgtgtgtcttcttggcttgttgccctcctatatcagactgaattctggggtggcaggtgggacttgtgcaccccggccctgctgaggtgctcaggtaatggggggaggaaactcctatgcccctccctccacccctaagattatttcccttcttgtgaactctggcaggggaaggggagtgcctctaagtttggcagaacccaggtgtcccttccctgccatccctactcagttacagggggttcctgcaccaccagcatacagggctggagagagggaagtagtcaggtgagagcaaaagaaacccacatacaagctccttcctctgggccaggaacccaagaagcaaggggggagaagaagcctccccagcttgctccttgggtcttgacccaaaactctacctcctgggaagtatccacctcccccaaggaaaagcggctgtgagaacagcagatcttcctacagcaggctaggtctccatgtgcaaccacagcagtgagccttcaccaacaccttgtggtagctctgatgaatacgtaagttaaatattaaagacctggaaaaactggggccttcgagcaagggctagaaggtaaaacaaagtccttaagaccctgcctgggttttctcagaacttaagagttcagttaaaataatggaggcattcttacatacctcgtaaaccttgtaccaggatccactttattttttaaaatttactttcttttctttattattttgagacagagtttcgctcttgttgcccaggctggagtgcagtggcacgatctcggctcactgcaacctccacctcccgggttcaagccattctcctgcctcagcctcccgagttgctgggatttaaggcatgcgccaccatgcccagctaattttgtatttttagtagagatggggtttcaccatgttggtcagactggtttcgaactcctgacctcaggtgatagctgatccgcccacctcggcctcccaaagtggtgggattacaggtgtgagccactgtgcccagccttttttttttttttgagagagtccgactctgtcccccaggctggagtgtagtggtgtgatctcggctcactgcaacctttgcctcctgagttcaagtgattctcctgcctcagcctcccaggtagctgaaactacaggtatgtgccaccacacctggttaatttttgtatttttagtagagacagggttttgccatgttgcccaggctggtcttgaactcctgacttcaggtgatctaccaccttggtctcccagtgttgggattacaggtgtgatgtaatggcacccggccccattttcctcttctctcagcagcacttcccatccctttcccaactcctcgccccacagctcagcaccaagaccctgtgcttggcagatctttgaatcaagcactgagaaattagaacattttgaaaaagcaaacatttccttttccacccccggtgattacaaaagtaacatatgttctgtgtcagaaatctggaaaaacaccacgaagagggaaaatgaggccgggtgtggtcgctcatgcctgtaattccagcactttgggaggatcacttgaggccaggagtttgagaccagccagggcaacatagtgagactgtctctccaaaaattaaaaaaatcagccaggcgtggtggtgcacgcctgaagtcccaggaggtgagtccccttgagtccaggaattggaggctgcagtgagctataattgtgccactgcactccagcctgggtgacagagcaagacactgtctcaaaaaaaaattaaaaaattaaaaaattaaaaaaaaaaaagaagggagaatgagactctcagtaatcctaccatgaagtggtaactacagtcaatgcttgtgtgaccctgcatttctttgttttcaaacagtctcactctgttgcccaggctggagtgcagtggcatatctcagctcactgtgacctctgcctcctgggttcaagcgattctcctgcctcagcctcctgcgtagctaggattacagacgcctgccacatttttgtatttttagtagagatggggtttccccaattggccaggctggtctcgaactcctgacctcaagtgatccacccaccttggcctcccaaagtgttgggattataggtgtgagccaccgtgcctggctgtgacccaggatttctaagagaatgcaaagatgtgctgcttctaaacttccttaggcacctcagccccctcagctcacttttgaccttccaatctgtttcatcccggctagagtctccccaaaagcagaggcaggggaattcccacaaaggaatgccctaaatcatcccaagatggggccagtggggatttcaagaaaacaccaattaccagagcaatcagtccaaagcatttattagggaaacttacagagtgctccaacaatcatcaagacaggaacgaaaaggggtgttctaccgaggcacagctgcagctagggggtcaggacatggagttcagatgcacaagtcagcatgtctggtttccattactattttgagtaatgggccacctgctggtctggcaggtgtcagcttgaccaaaacaggattgtggattctttccctgggatgggacgttccacaaccttggttttatatttagattttcttttttttgtttggtttcttttggagacggagtctcactatgtctcccaggctggagtgtagtggcgtgacctcggctcactgcagcctctgcccccctgggttcaagagaagaattctcctgcctcagcctcccaagtagctgagactacaggcgcaggccaccacgcccggctaattttttgtattttagtagagacggggtttcagcgtgttgcccaggctggtctccaactcctgaactcacacaatccgcctgccttggcctcccaaagtgccaggattacaggtgtgagccaccacacctggcctatatttagattttcaaggccagtttctggaatttttaagcaaagtacacgggataaacattatgagaccttagcacagaaaaacagaagagaggttgggtgtggttgcttacacttgtaatcccagcactttgggaggccgaggcaggcggatcacctgaggtcgggagatcaagaccagcctgaccaacatggagaaaccccgtctctaccaaaaatacaaaattagctaggcatggtggtgcatgcctgtaatcctgggagtttctctcttgttgcccaggctggagtgcaatggcaccatctcgactcaccgcaacctccgcctccctggttcatgcgattctcctgcctcagcctcccaagtggctgggattacaggcatgcgccaccatgccaggctaattttgtatttttacaaaattaaagagatggggtttctccatgttggtcaggcaggtcttgaactcctggccttaggtgatctgcccactttggcctcccaaactgctgggattacaggtttgagccactgcacctggccttggagaattcttaaaccactgtagcagtatagttcaacgatagtaaaagggggttttagtctctggatcctgccattcaaaagcaaataggccggttgcggtgcctcacgcctgtaatcccagcactttgggaggtcgaggtgggcagatcacttgaggtcagcagttcgagaccagcctggacaacatggtgaaatcctgtctctactaaaaatacaaaaattagctgggcgtgatggcatgtgcctgtaatcccagctactaaggaggctgaggcaggagaatcgcttgaacacgggaggttgtggtgagctgagtttgttccactgcactccagcctgggcaacagagcgagactctgcctcaaaaaaaaaaaaaaaaaaaattgagatagcctcactctgtgttgcccaggatggagggatggagtgcagtggcgcgatctcagctcactgcaacctccgcctcccgtgttcaagcgattctcctgcctcagcctccaggtagctgggattacaggtgcctgccaccacacctggctaattttttttttttttttttaatagagacggggtttcaccatgttggccaggctggtctcgaactcctgaccttgtgatctgcccacctcagcctcccaaagcgctgggattacaggtgtgagccactgtgcctagcctcaaaaaaaatttttttttaaaggccagatatctccacaggtagcttactttatgttatggaaagtgccaatttactgagcaccaaatgaatacataatggagtattcttcatgtagattaaataatgtgaccatactctccctctttcccctccagcccacttttccctttaaataatgaagccctcaaaatcatatttggaaaaaagcacggatcacagattgttcctggggttttgtgttccttttctcccaggcttgtccttaaccttgtctacataaacctgtcaatttattgagacctgtctcagatactttttggtttacaaattgtttgactgaattgaggaaggacggtccttgtcccaccagccctcacaaacctggaatctggtacaaagtgctccccaaagatacagctgcaggagattgtgcaaatgtgcaatgtttccagttacctcgcaggcatttaaggttggtgactggcagtgagaaaggagaatagggaaaatgaggcagaagaatagcaaagggaattaaaagttggataaagggtaaaatacgtaaaagcagagagcagaagcaaggtgaaagggcacccgccccttcttgctcacccagcaagaagcaagataaatggcagaagctgaggagacaaaacaaaaggaagattaaaaactgagtaaaggccgggcacagtggctcacacccaacactttgggaggctgaggcaggcggatcacgaggtcaggagatcgagaccatcctggctaacacagtgaaaccccgtctctactaaaaatacaaaaaaattagccgagggtggtggggggcgcctgtagtccctgttactcgggaggcggctgaggcaggacaacggcgtgaacccgggaggcggagcttgccgtgagcccagatcacgccactgcactccagcctgggcgacagagcgagactccataaataaataaataaataaataaataaaattaaaaaaaaaacagtaaaaatcccacggccggggaaatcaggaccaaaccagtaaggagcagctctttaggcataagcacgcgcattaaagacaaaaagtatccttaacatgataaggataaccagctcattagcgctcatgcatatggacggcatatcatgaatggaggcggctctcaagcacacaggggccaaagtaagcaacacacctatcattcaaaaaggtagacactggctagatattaggcagccttgggaagagaaaaaaagcctggccaataaggtgaaaccccatctctactaaaagtacaaaaattagccgggcgtggtggcgggcgcctgtaatcccagctacttactcgggaggctgaggcaggagaatcgcttgaacccggaaggcggaggttgcggtgagccggcaccgcgccattgcactccagcctgtgcaacagagcgagactacgtctcagaaaaaaaaaaaaaaaaagacccaaactataccaagctggggctgatcttatctcgcagaggtcagtccgctctccccactccgagagtggaatactgtgcttaataaacttgcagctttgccatctctgtgtgtctggtccaaatctttcttcaggacaccaagagcctggaactgtccggcaccatgcggtaacagcagctgttgggcagcgtagagtctactctaggatcaagcttcgcctactgactggagtccgtatcccgggggaacgcgatggccagagggaagaggtgagccaaatgctcaccaagcccagccctgaatgaacccagggggtcagaagggatgactgcagaactcgtcccccacccccaccctccgcccttgctcctagttgccgctgcaagaggcttcgggctcaggatcaggagcttacccctactcccgggaccctctggcgtccccaccatgtgaccgagtctccctgcaacaaacaatgacttcaaacgagctgggcgccggcgcctgacctctgactctcgctccacgccccttccctggccacaaacccgccgaggcccccctctctacccggcgcgcctaccacaggcgcgacacctgtcaagccttgggacaccgaaaccgtacctgggaacagcaaacacaccacagactgcagacccggaagaacttgtcccagtgttgaccacaccccctggctaggggcagggcttccggcctcgaactttaacttccgcttccggttcctagcgttaactgcgaccggggttcagcgctcgggtgaggagctggtggcgtcggcaggttcgaggcgattcgaggtgagggggtcaagcggagaggctcggagtcggagaaagctgtcgcgacccagccacccagggtctggggtcggtgggaggtgaggccagggagttttgtggcagggctttcaggcggcgagaaggggcggaggcgcggctccccggggttcgcggccctgggacaggggacttggggcctgggagtattcgagtccggggggttgggggcagaacggaaggctcagtaacctggaattttagggcctgggactgggagacttgtaggctggggcttctgggcctgggagacgcctgaagctctgactttgctgcctcccacccaccccccgctttgtgtagctccagctaggatgatcgaggttgtttgcaacgaccgtctggggaagaaggtccgcgttaaatgcaagtatccactggcagccgagaggcagtggtacccgcaggggtgcttggcgtgaggcaggcaactcaatctgtgttgtcggatggttttagttaaacccgggagagggggcggatggggtcctggcagatggtattctgccctagaatgtcctcttcctcgttctaccgcttccatttgccttaactgctctgcgcccagcacggatgataccatcggggaccttaagaagctgattgcagcccaaactggtacccgttggaacaagattgtcctgaagaagtggtgagtgcagcggtagagccactgggtggactggactaggccggaaggttttggttgggggagcgctgcaggcagccctttgcttaggcttggctacctcatttggcctacagactgaagagcctccttagccttatctctgaaatgtctctttttcttaggtacacgatttttaaggaccacgtgtctctgggggactgtatcctttgtgtgactttttgaggaagcatctacatacccagcctcggttatctgttcaaaactaaagtctgcatgagcttatgcatattaagtgtttaacttaatacgtggcacatggtgagcacttagaaaatgggagctaggtaattatttggttggggaggagagtggttggtgaaatagtttgacttcaagttcaaaatatttattactgacctccacctgagtgctggacagtaggtcagggtggggtgagactcaggcatatctattgtgcaaaaggagcagaaactttttacaatttttattttatttatttatttttttgagacagtctggctctgtcgcccaggctggagtgcagtggcacgatcttgacccactgcaacctccacctcccgggttcaagcaattctgcctcagcttcccaagtagctgggattacaggtgtgtgccaccactccctgctagtttttgtatttttagtagagatgaggttccaccatgtatgccaggctagtctcaaactcctggcctcaagtgatcctcccgcctcggcctcccaaagtgctgggattatagccgtgagccactgtgcctggcctagaaggaacagaaacttttttttttttttttgagatggagttttgctcttgttgcccaggctggagtgcagtggtacaatcttggctcactgcagcctctacctcccaggtttaagcgattttcctgtctcagccttccaagtagctgggattacaggtgcccaccaccacacccagctaactttttgtatttttagtagagacagggtttcatcgtgttggccaggctggtctcaaactcctgacgtcaagtgagccacctgcttcgtcctctcaaagtgctgggattacaggtgtgagccactgcacccagccagaaattcttttgtaaagttttggttctctccaaataaaaatggcctggtccaaaatgggcttccttagccctgggctgagacctcaggccacctgacccggctgtgaatggatgagaggggtggggacggaagtcagagtcaggattccttaacacctttccttcagatgaaatccacgatgggatgaacctggagctttattatcaatagatgagaatcctcatcttcctgccccgctttcctctcccatcctcatcccccacactgggatagatgcttgtttgtaaaaactcaccttaataaagacttagatgttgctttgttgttgtctctgtatgacagctgtctagtgatgggtggatcagtcgctgtttggtcatcactgcaccatcagcatgcagctgctaaaataagagctctgatcaactggatccatgagggcagagtagaccagcaggctgggagtctgtgtgggagcccagagagagctctggggtttgctgtgggtgtctgaaggtcaagagactctgggattattgtcaccctaataaaccaaagaacctccggctaatgacagtagatgtaattgttaggaattcagattctgaaatcacacagaccatgtgtggaatgtcagctctgccaccaagcagctgagtgacactaggcaaaattttttaacctctgtaagcctttacttccttatccactggaaataattgcgtttacttcatgtctgctttcaatcggcatattgtgaggaggtataaatgagtttaaagcatgtttaaacatccacagttcctggcattttttttttttctttttttgagacaggatcttgctctgtcacccaggctggaatgcagtggtatgttcatagcccactgcagccctgaactggactcaacacagtcctcctgcatcagcctcccaagtagctgggcagtgtgtaccaccacgccagctaattttaaaattattattattatttattttatttgagacagagtctcgctctgtcacccaggctggagtgcagtggcacgatctcagctcactgcaacctctgcctcctgggttcaagcaattctcctgcctcacctgaggcaggagactgggactacaggcgtgccccatgacaccagttaatttttgtatttttagtagagatggggtttcaccatgttggccaggctggtctcaaactgctgacctcaagtggtccaccctcctcggcctcccaaagtgctgggattacaggcgtgagccaccgcgtctggcattttgaaattttttgtacagacagggtctcccctatgttgcccaaaatagtcttgaactcctgacctcaggtgatcctccagccttggcctcccaaagtactgagattataggcacaagccatcatgcctggccctagcacttcttttcaagacaaaacgtgatagtagacagtgaggcagtgtggcactataagtgtggctacatgatcccagcctcaagagtcagaccgactagatttgaattttgattgatccttagcagtgggatttcagcctctgcgaccctcagtttcatcctctaaaaatgagcactacagtggcacccacatctcaatgagaccacgcaattagaatagcaggatgcctggcacataatgttatttgctgtattcttcctctaggtgtgagtagacaggagaccaactgtccctctgttcccctggccacagttctttgtgtcaaccttgctcctgtcctgttttattttttaaattaaaaaaattttttttttgagatggagtttcacacttgttgcccaggctggagtgcaatggcatgatctcagctcactgtaaaccccgcctcctgggttcatgtgatttttttgcctcagcctcctgagtagctggaattacaggtgcatgccaccacacccagctaattttttttagtagagacagggtttcaccatgttacccatgatggtcttgatttcctgacttcatgatccgttcacctcagcttcccaaattgctgggattacaggtgtcagccactgcgcccggccctgaatttcttatttcttataccactcctcccaccagtggtgggcattaatacatttgagtgactctagaaactttctggaataacctagagtttttatcatacggggataattatatgtcccgtaatatttatatgacattccatagtttgcttttctgtgcttttttttaattattattttttattattattttttgagatggagttttgctctttttgcccaggctagagtgcaatggtgcaatctcggctcactgcaacctctgcctcccgggttcaagcgattctcctgcctcagcctcccaagtagctgggactacaggcacgagccaccacacctggctaattttttgtatttccagcagagacaaggtttcaccatgttggccaggctggtctcaaacacctgagctcaagtgatccgcccgcctcagcctcccaaggtgctgggattataggtgtgagccgttgggccagccatgatttagcaattttgaaactacttttgtgtgtgtgggtgtgggcacatgggcccatgtaatacacacaaacagggttgaacaaataagtaaacttgtagataatgagagctgggtgtctcactgtggagaaggaagttacaaataaaacaggagatgggaatgcttaaaatgaaccttgtaggactggatttggaggcatcagtctgaattcatggttttcgtttaacagatatattgatacatatagatgtgtgtatacatatgtatatttccttgctctatccacttagagggaccagaaacagtgacactccaggaacagtgagcacccatcctggaacataaaaacactagtgggaaaacaggattggggggaatttgtggtttagttaatagtattatattgatattggtttcttagtgttgataattatattatagcagggtttctaagctttggcattgttgacttttttgggttggattttttttttttttttttttttttgagacaggctggagtgcagtggcacgatcttggctcactgaaagctccactccaggggttcaagcaattctccgcctcagcctcccgagtagctgggattacatgcgcccgccaccacacctaattttcgtatttttagtagagatgggttttcaccatcttggccaggctggtcttgaactcctgacctcttgatccacccaccttggcctcccaaagtggtgggattacaggcgtgagccaccgcacccagccttttatttttatttatttatttattttttgagacagagtctccctctgtcacccaggctagagtgctgtggcaagattatggctaattgcagcctcttaactcctagactcaagagatcctcccacctcagcctcccaagtagctgggattacaggcacgtgccaccacacccagtgaattatttttgtagagatagggtcttgccatgttgcccaggctggtccccaactctgggctcaagcgatcctcctgccttgggctcccaaagccctggattacaggtgtgagccaccacactcagcccttggattggataattcttttggtgggggctgtgccttgaaggatgttagcagcatccttggcatctaatactaaatgccagtagccagtagtatctcctgttccaaaatgtctgaaggtgttgtaacaaccaaaaatgtatcaagatgttgccaaatgtcccttgggaaacaaaatcgctactggttgagaattctgttctattgtttatttaagacgctaatattagggaagtttgggtgaagggtacatgaaaaccctactgtttttgtaactgcccatgtctaaaattatctttataaaaagtatctttttaatattatgctaatacttgtaaaaaatgttctattaaaacttaaactttttttgttttttgagatggagtctcgctctgtcacctacgctggagtgcagtggtgcgatctcggctcactgcaacctccgccttccaggttcaagtaattctcctgtctcaaccacccgagtagctggaattaaaggtgcccactatcacgcctggctaatttttgtatttttagtaaagacagggtttcaccatgttggccaggctggtctcgaactcctgacttcaggttatccacccacctcggccttccaaagtgctgggattacaggtgtgagccaccgagcctggcttgagtgctttatgtggattaatttatttaatgttcacatcaaacagaaggatgtaattgcttatccccgctttgcagattgggaaaccgaagtacagagtaacgttaagtaatcagttcaaggtcgcatagcaagtgtcagtcccaggctttaaacccaagtctggctccagacttctcttagccttctactgcatcctgcgtctaatttgttgtgggcaggtttccctatgagttcacttcactgagcctcattctttttaacggtcacatagggttctatgctaggtgaactgtagttgcaccctttgctgtcagtgtcttcaactcccatatctacccacagttccccaactctgggtccccaaatacctcccctgtgtcccacgggctctgcagactctattttaagttggctaaaactgagcccatctcctcccacctgcacctcctccgtgttcttatatgaatgtcaatgtcggcacccactggtcacccaggatggaggaaggagccagactgcgagggaataaaggaagtaagcaggttccaaaggacgtggaaggcctttgggtccagagcctagggaaaagttgagccctgcaaaaaataaaagaggctgggttagctttggacatctgtgggaaacaggtgggaagagggaggatggaggagccaaatttaagcatcgggtacttaggtgctcatctccaaggcaactgcattgctatggcaacagcagaggcagcaccgccccgcccaagtacctcctggaccgccgttacctctgcaccagccagactcttccgcatgggagggctgggggcttgcggacctccgggaacagctcaggcaggcgggagttgctgcggcattagccaatccataagctctatcccgcctgggtgggctctgcggcgacgcgcgccaagaaggggtcgggagttttttggcgctcgctaaagggcgttgagaagggcgggcccgcgtcgcttcggaccactcaggagccgaggagagcgagtgggcggggccaggctgaggctggccgggggcggggcgcagggataacgtgggagggtccgcccagcctttcttctacccaatagaaggccagaaagccaatccggaccgttagggagcccaatgggcgtcgccgccaggccccgttgcagagcgcgtctagccaataggcagcggcggcgggcgggcgcgggcgacaggcggcgcagctgaggcggagcaggcgctgcggcaggagggaagatggcggacgaggagaagctgccgcccggctgggagaagcgcatgagccgcagctcaggtgccgcgggggtcggggctggggcgggactgcgcgggcccgcgtaagcagggctcgagctcgccccttgggcgcggcggcagcgctgcctccctcccatggggtcctggctcttccgcgtcgtccccggggtaacggccccggcccgccctgttgtggggactgcgagcctcaggagccgccgggaagcctgaggaagctgaggcagggggctgggcgggtgagggtccggggagtccggggcgatggccctggccctgccggcccggctgatacctctcggcctaatgcacctgacaccccgggggacgtctctgcaccttgctgggcccgggggcacccctgggagggagacaccccagtaccctgcaaagggcgtagggtgttgcccggcctcgggtccacaacctacccctgctaacacccctactgtgtacacctaatgctgagtctgcgacatcgcccgtgacattctgccagacgatggcccctgtgcttaggcccgatttaagggttagccacaatgataatattgccagtaacagggcatgtttttctctgtgtcaagcgctttaagttctctctgaattgccgcaactctgggagccaggtagttattacttccaccttaccagcaaggaaactgaggtcagaaaactgaaggaactcgtccaagatcattcatttcaggggccgggggttggattaggacctaggcagtttgcctacaaatccccctccccgtgtcactgcaaactcctgaggagcaggcccagcatctgtgggcaggtcccgagtcactctgctgcctctagagcccatagcaatcgcatttgcaataataattctccttggttgagtgccaggttctggtgaactgtttggatacatggactctcctcattaaccccatgaggtttgatctccttattctctattccccatttttcagatgagaaaactgaggtgcagggagattagagcccattgccaaggttttagagtgagtcagtagctcagctgcatttgcacctggaacccgcgctctcgcccaccctgctctagccctggcctgtggctgggacctccagcataaaccggatgctctgcccagctctgggcccatttctgctgtttctgctcagttcaaccctgatggcttcctttatgggtgacactccatgtcacccaggcgaactgtcagcctttggagtggcacccagtagggtctttacttccagtttcttgttcacagtcttcactccttcatacccctcactccctgggtaacatcgggccaccagtaatgctggttcctagctctgcaacaccatgcacggtgtagtagctaagagcagagctttcgggtgtgaagtacctgagtacagttcctgccttcccctgtgtgtgcctggaacagagtaaacactcaggaagcgttacccactgctgccattcccagagatgcaaaaggtgaggtctccgttttgccatctatacaatagagataataaaggctatcccactcttaatgtgtgccagtttctgtcctaggcattttgtagatgtgtgagcttatttagtgctttcttattattatttttggagatggtctcactgtgtggctcaggctgcagtgcagcctctgcctcccaggcttaagcaatcctcccacctcagcctttcaagtagctgagaccacaggcgtgtaccacccacccatggctaattttttattttttattttttattgtttgtttgtttgttttgagacagaatctcactctgtcacccaggctggagtgcagtggcatgatcttggcgcactgcaacctctgcctcccgggttcaagtgattctcctgcctcagcctcccgagtagctgggattacaggtgcctgccaccacgtctggctaatttttgtatttttagtagagacgaggtttcaccatgttggccaggctggtctcgagctcctaacctcaggtgatccacctgcctcagcctcccaaagtgctgggattacaggcctgagccactgcgcccagccagcctgttgtttttgtttttgttttgagacaagagtctcactctatcgctcaggctggagtgcagtggcatgatcttggctcactgtagcctccaccttccagattcaagcaattctcctgcctcagcctcccgagtagctgggattacagacatacaccacaacgcccggctaatgttggtttgtttgtttgtttgtgacggagttttgctcttgttgcccaggctggagtgcagtggcacaatctcagctcactgcaacctccatctcccgggttcaagcgattctcctgcttcagcctccccagtagctgggattacaggtgcctgccaccatgccgggctaattttttatatttttagtagagatggggtttcactgtgttggccaggctggtcttgaactcctgacctcaggtgatccaccccaccttggcctcccaaagtgctgggattacaggtgagagccaccgtgcttagcccttttaaaaatgtttaaaaattattatttagtcctttcaatgaccctaaggtaggaactgttatctccattttgcaggtgagaacaccaaggcccagggaagatatatcacatttgaacccagattcagatttgaatccaggtggcctggctgctgagtgcatggtttgagtcactccctgtcccccagcttcctctgttccatcactctgggttattttcctccttgaagttatcagggattgatactatcctgtgtttcatttgcttgtttagcacctgtctgctctcacctagaatgttagctctctaagggcagggactgtatcctgccacattggcccacgtctggagagcctgtggcacatggtggatacaccatggatttgttgaatgaaggcgccccctgcaagccaggccctcaccctggcttctggctgtgggcccaggggtgtcctgggagcacaaccctagctgaattcctgcctgccctcccctccaggccgagtgtactacttcaaccacatcactaacgccagccagtgggagcggcccagcggcaacagcagcagtggtggcaaaaacgggcagggggagcctgccagggtccgctgctcgcacctgctggtgaagcacagccagtcacggcggccctcgtcctggcggcaggagaagatcacccggaccaaggaggaggccctggagctgatcaacggtgagcagggcgagggcaggggcttgggagggggtcttctcccaggtgagcctttgtagaagtcacatcagacccttcaccccagcttgctcagctgccaggcgtggtgttggccaacacaaaaacgccagtgcatgacctgaccctgaccttcacagcagccattctctttcttttccatctggcatttgagggtgagccaggtaggggcagaggacccagcctgggggctggcagacatgggttcaggtagtagctgtgcctctgtgaactctgtgacctttgggaggggactcgtgtcacctcccctagactcagctttctctgtaaaatgggcatcctctaaggaccattgtgaaggttcaagggaataaggcaatggattttgcacagtaggccctcagtctgtgggaagtgttgtcaatagtaatatcatccactaggggcctgagtcataaacataggtggatccagagagagcagtcaggaaggtagtgagtgcatgcagggtgcggtggctcacgcctgtaatcccagcactttgggaggccttggagggcagatcacctgaggtcaggagttcaagattagcctgggcagtatggtgaaactccatctctactaaaaatacaaagattagccagatgtgttgacgcatgcctgtaatcccagctactcgggaggctgaggcagggaggcagaggttgcagtgagccgagatcgcaccactccactccagcctgggcagcaaagtgaggcaccatctcaaaaaaaaaaaaaaaaaagaggtagtgagtgccagtagatagtgagttaattctgacctaagggaggaagctattccctgctctgttctgtgtttcctctgcagtctggcaccaaggtggcaaactttaaaggccagatggtaaatattttaggttttgtgggccatgcagtctctatcagctctgctttgtaactggatagcactcataactaatatgtaagcaagcacatggtcatggctgtgtgccaagaaaactttactatttacaaaatctgggaggatttggcctgcaggccatcatttgcagagccctgtctaaagctgtccagtttggctgccactcccaccctgtgcgggaggatcacttgagcccaggagtttgagaccagcttgggcaacatagcaaaaccccgtctctaaaaaaataaaaaaattagctggacatggtggtgcacgcctgtagtgtcagctacttagaagactgaggtgggaggatcctttgagcccaggaggcagaggttgtaatgagccgagatcacactaccgcactccagcctgggtgacagagcaagaccctgtctcaaaaataaataagataatatcaaaaattggtttctcaattgcactggtcatactttagctggtggctgccatctttgacagcgggaatataaaacatttacattcttggccgggcgcggtggctcacgtctgtaattccagcactttgggaggccaaggtgggtggatcacgaagtcaggagatcgagaccatcctggctaacacggtgaaaccctgtctttactgaaaatccaaaaaaattagtctggcatggtggcgggcacctgtagtcccagctactcgggagataggcaggagaatggcatgaacccgggaggtggagcttgcagtgagctgagatcgtgccactgcactccagcctcggcaacagagcgagactccgtctcaaaaaaacaaaaacaaaaacaaaaaaaaacacttttccattcttgcagtaagttgtgtctgatgcctttctcagagtccccaaacctgggctgtccctactccaaacaacccatctctcaaccatgcccagacagcctgggttgctatgcagctctgccacgtcctggctatgtgctcttgagcaagttacttaacatctctgggcttcaatctttttctccttcttcttttgagacagggtcttgctctgtcacccaggctggagtgcagtgttcatagctcactgcagcctcaacctccttgggatcaggtgatcctcccacctcagcctcccaagtagctgggactgcaggctcataacaccacacctggctgatttttgtatttttagtagagacaggacttcaccatgttgcctaggatggtctcaaactcctggcctcaagtgatccttccacctcagcctcccgaagtgttgggatgacaagcatgaaccaccgcccccagctgtcagtctttttcatttataaaattagtattagaataataagacccacttcacagggtagttgtgaggactcctggctaatacagtaaagcgggagtaacagctcctggcatcggtaaatgttctgtcattgttagtggtcactgtcattgctgttgttggttgtggtagcacagggcccagcacagagtgtacactcggtcagtattggctgttgttttactctctcatcacttggtccagttggcctgtaggatgttattacatatgcacacccccaacatggcatctaggacagtaagtgccacccgttagtcttatatgtaagcatggcagagagaagccgagttcttgcacagaatcttgaaggctgattgaagagccagcctcctgacctctgagggcagggactggatctctctctttcccctgtattcccatcctgccacacaaagcctggcccagagtcagccctcacagccttgtttcatgagccagtaggaagcaagaaggattcctggcacaggacggggcagaagtaaaggcctaggactaggatgtagccagaactctggggaaggctttgcagggagctagggggtgatgagacccttcacgggcaggtcccagccaggttgaggagggtccttgtcaggtgaggaggtttggttctttcctggaggcagcaggacatatgtggccatgtgggaccaggagaggaacccacagtgctctgctttcagcagagatctgtgaagctagaatgtcaagggccagggaagtggaaggcccagaaccttcaggggttctggttgccccagagcaagaagaagaagtggagggagaagccaggagagaattgcaagatgacccttcaggtcctcccagctctagtggtctctgttctgaggcttccggaccctataagagtgagcaggagggtgcaggcatttggggatggagcggcatgaagtgggctcctgggggtcagcagagcagccaggcgcaggacagagctgctccaagcaatcctgatgagagctggcagaaggctgaggtcggtggggatagtgaggagggcatgggtctgggtgtggtgggcgagggtgtctcgcccatctctgggttggacaggtgcacctggtaagtagccaggccctgaggcgtcaccgtaggtacctgcagattctggaatgtcagcaggagccttgcctgcccacctggtggaagctgtgggaggaattggagcaagaggcggtgtgacttgaacttgggggctggaagtggaagaagaagtgagagggagcagacccgagagagattcaggaggcaggatagagaggactgggtgatggattaggtgggcaagggtgggatgtctgggggagggtcagggcagaacagcgtggcccaccctgggctcgtacagggctggatttcagtgccagctgtgtggtcttcatttcctgagcctcagttgcctcatctgtagaatggggagagggtggctatgaggatccaggagctatgggctcagtggctggcgtgctctgcacggtggagcctcagccccagtcattggggtgtggacgatgggggagctgaggtcaagtcaaggcctctgctcacgggcagcccctgctgccaccccacagcccgtagaaagagttccggataggaccacaggaggcctggtgggctcagcacacagatgatgaccttggcacacgacctccctctcctggtatcctcctgcctgagacggtgctggggcagatctcctcagaggtcgataggaggatgcagtgaggtggccccggccgaggtacactcggtaacagatcatcatgtgcagtgtcggcgcaggcattgggcacctgggcctcattttctcttccatgaagtggatgttctcccctcgagggttcatgccgggtgatcaggagaccatgatttgggcagctcactccccagctggcagccgggctaaatctcatcagtgcccatttagatctggtgctccgcccttgccccgaagggacaggctgcctgcagagagagccgggacctccacattttctgctgaggctccttttcccagcattggctcctctgcagctgctgggccacagccagaggctgtcagagatccaagggagtcattgccagtgtccttgtctaaggaggatgggccatggagaagccctccctgcccgctctccacccagatctgttgacagccacccctcacatgcccagggcctggagggtcccagcaaggctgagactatgagcagctgtcctactcacatacccatcccagcatccaggtcagcccctttgtcctggggtcctcaaggtcactggcgcccttccagcctgctggccttgggccagcctctagcccctccttctggatcttggtcttctcagatctgaccctgtcacctctttccccgaccaggccccttcccctctggtgcctgggcagcctgggggaagtatgctggaagcagcgtaatgatctggcaaggcagaggagacagcacgtcttgaaacatttttggggtcaaggactaccccatttgttccctcactcccacctaggtcactgatgtgcattagcttggactgttgtaacaaaatatcacagacagtgtggcttaaacaacagtcatcactttccacagttctggaggccagaagtccacaatccaggttccctcagattctgttcctggcgagaacccacttcctggcttgtagacggctgccctctcactgtgcactcacatggcattccccaggcgcatgtgcacggagtgaaggagcacgagctctctggtgtctcttataaggacactaatcctggccaggcgcagtggctcatgcctgtaatcccagcactttgggagactgaggtgggtggatcacctgaggtcaggaattcaagaccagcctggccaacatggtaaaactccatctctactaaaaatactaaaaaaaaagccagatgtagtggcgcacacctgtgatcccagctactcaggaggctgaggcaggaggatcgctggaacctgggaggcagaggtcacagtgagccgagattgtaccactgcactccagcctgggtgacagagccagattctgcctcaaaaaaaaaaggggcgctaatcctgttggatcagggccccacccttatgacctcatttaaccctagttacttccccaaagtccccatctccagatgcagccacactggaggttagggctttaacacatgaatttggggtgacacaaacattgagtccataacggatgggcagcttggatctgtcaggggcctgctctgcaacagccactgcttaagcggtcactgattcactccttggaacaggctccaacgtgggagcagcggttaccccattttacaggccagttgagtgaggctccaagaggtaaagtcacctgccagactctcattgttcaggagcagcagaggtaggatctggacctgatggagtctggagtcagcacccataacatgtcctcctggaccttggggatacactgtgagcaggctggctggggtctgccagcacagataggtgccattctgttttgcatactatttcagggggtcctgaacaccttgaagcaggtggaggcccctgctccagactgggagctcctggagaggccaccctgtgtctgtgtggttctaagctggagccacatcgaatcaggatggggctccagcacccgacagtccccatcaaatttcacaggttttggcgccgtcgggcaaggctgacacattgtcttggaggaggcccaggaagtctggccttagggtcgcagcctgagtttcaggcagatagggcatgagattccagcatttctgcttcgagccccgtggtagatccctgtctccctccttccccatggcctatttctgtctcatttattcattaacttcttgaacattcgtgaacacctgttttgtgcacagtgctgggttctgagggtgcagcaatgaagaaggccaacccagcagcctccattcctgcactgtgaggcgggcaagcaacacaccaatgggacggtagtaaatgcagcacccagggggaggcacctaacacagtgggggattaggggaggcttcttggggagaccagaggatagctgatgagtttcaggcaggacaagaggcttaaaccaaggtctgcgaggtgggagtcggaggatgtcattgtcgcggggtcaggtacaggctgagctaacaagacacacaggaccaaacccctcaaggtcagcctcacagagcaggaactcaggaagaaagcgtttttgtttgtttgtttgtttgtttgtttgtttgtttgaaatggagtttcgctcttgttgcccacgctggagtgcagtggcaacgatctcagctcactgtaccttctacctcccagtttcaagagaaagcgtttttttgtttgtttgtttgtttgtttgtttgtttgaaatggagtttcgctcttgttgcccacgctggagtgcagtggcaacgatctcagctcactgtacctttctacctcccaggttcaagagaaagcgttttaaaaaaaaaaatcattccagctacttgcgaggctgaggcaagaggattgctgcagcccaggggtttgaggccagcctgaacaataaagtgcgaccccatctctgcaaaaggaaaacaaaaacagtcattgcaggctcccatcatagcagaaaattttccaagagagctggcaggtcagaggcagatctgggtgatatgagctattggtgtgccaaagtgtggcttttatttgtttttaagtggtatggcttgcacactatgtgtgtgagagaggacaacttgggcgggctgtccaatttcagggatccctgtggctgtgtccccagccctggccgctgggggctgtggcaaggtgatgcttgttcagggcctgggcctggctcctcagacgctcagtgcctgcaggcagtcctgcttccccgaagtaggtgggtacctctgggggcaccgtgcgatcccctggctggcttagtggtccagacagaaggggggacaggggactccagtgctctgtgcctaaggccaaggagatacctagaagttcagggagaggaggggtgggagggggtcctagcaacatctggtttaagtcggagtcactggtggatgtgtctggcacagaggaggaccccgtggcagccctggaagcggggcattctgatcaaaccagggcatcacgggcagaagcctctgtaatgtgccatcccaacagaagctggggccctgtatggcatcgatgtccctgtcagaccaggacacgtgggccggcagggccaaggatagggagagcagagcagtagaggctgcgtcatccctgggatgcagtccccatggaggggaagaatgatgacagcaagggacgttggtcagggtcctgctcggtgccgggcactatgctgcatgtcacagccactggcacaagactgtcaggcggaggggcacagggatgtcagggcagcaggtcgtggtgacatccagctcagataccaggacactggtggctgccatgacgtgcagccaaacagggagctatggctgtgctctcacggtggtaccatttccactgcagtcccaagcaggttagagcgtgaggccgaggggccctggggacacttggatcagtccagtgtgttcagcaggtgccacggttgggtgtccaggcctcccagcactggctaggtcacccagcagtgttcccgtgggtctccaacaggctccaggccagtgtatcagctatgtatgtcctgggcaagttggccggcaggtgtgtcatggcatcatttaggtcagaaggagcaagggtagaagtgtcagggtgacattaagaaaccccctactgagtgtgtcagggtgaccttcacgttggagagaagaactggtgtccctggagagtggctgccaggccttagggtacacggggcgggtgcagttcacccagagggctgccctggcttgctggggctgtcgcaccactggcctagggaggacactggaagggacgcccgtttgtgtcagagcaagaggattggggtagggcaggctttggcccatgggcaccttcctgggggtggcctggagtcaggaaggcggtagccattcctcctgacctggcacgtgcacaagactgcatacacacacttgctcacacacagtcacaccacacacaccacgtgcacacacacgcagccctccccacttggcttccgaaacgtgagtcactcagatgctactctgctgccgtcttgccccctctgctggcagccctgttcctcctaactccaccagccctggcctcctccgcctcctggagagtcagagccgatgggctagtttgggccacacagggtggggccaccctgagttctgccagcatgcagactgtaggtggggagccgggagaagagctatgttgcctgcctctgggaccctggggctacagcccacgagtgtcccttgcagagcccaccagggtgccttggaggcccatcccagtgccaggctgttcttcccagatgggacagctggggccacaggctgccgtggcagtgctgggctttctctggacagctctcccacctctgcccagggggcccggggggccagccccctgcctgggtcagcctctccctgcctgctgctctcctctggcccatccagcttgtatgtagattttccctcacgtgtgtgtgtgtgtgtgcatgtgtgtgtgctggtgagagtgacagcgggagcagggatgtgagacctgcagggtggcagggctcatggatgactggcggggtgcattaagtgctcatgctcgtgaaaggcacctcttcttgggtgtgggtgaggacaggtgtgactgcgcatgcaggtatgtgtgaggagaggggttgtggggagcatgtgcgcctgtgaggggaggctttccaactgaagtgctgcctcccccgctggccagctctggagtcctccatcctgtctggtcaggccccccccaacccctgacctggcactcccattccgttccatgtccacaggctacatccagaagatcaagtcgggagaggaggactttgagtctctggcctcacagttcagcgactgcagctcagccaaggccaggggagacctgggtgccttcagcagaggtgcgcaaggaatgggcctcaccaggttgggggacccttaccaccctgaggggtagaggccaggagggtctgggcattgggctcccaggtgccacaccggccttcggggtccagcaggtggcagcacagccccttcctcaggcttcagaggctgctctgctgggcagggccagggccacacagggaggggggctgcagcactttcttcctggcatcatctctaccctggggggcatggtctcttgtgtgtctgtgcacagatgtcctcatcccaggcccaccaaggtgggtacatcctgtcctctgcctcttcctttttgtggtttaaggttgagggccctgagagtcccagggcctgtcccccagaatccctctcaaaggtggggaaaccaggggtgagaggaggtggccctgagtttaggcctgtctggccaggacagtggaaatcagggacagaggggactaggcctcctcctcttcctcctcttcagtcctcggggtctacagaaaaacatcagggagaggccaggatgggttgcagggtgtggtgtgcaggtgtcttagtggggtggggcggcagcatggggccagcagctgcccacctcctccgaggaggctggtgggacagatgacatggcagggctgggaaccaggcccagggagacgagttcactaccgaagtggcccctaaatgcacggcggcggccgtagccctgcctgctatccttcatgctgtcctcgggcttcccagggcctccttaatggccctgccacccccagctgggccgccgctcagcactggcaataaacatggtgacggatgagtgtggacgagtgtgaggctcagcgcaggcaggagccccatctgtcgcggctgccacccgccctgcctcatcctggcctctgccagcccagccctgacacccccaccgcccctcctggctcccaggtcagatgcagaagccatttgaagacgcctcgtttgcgctgcggacgggggagatgagcgggcccgtgttcacggattccggcatccacatcatcctccgcactgagtgagggtggggagcccaggcctggcctcggggcagggcagggcggctaggccggccagctcccccttgcccgccagccagtggccgaaccccccactccctgccaccgtcacacagtatttattgttcccacaatggctgggagggggcccttccagattgggggccctggggtccccactccctgtccatccccagttggggctgcgaccgccagattctcccttaaggaattgacttcagcaggggtgggaggctcccagacccagggcagtgtggtgggaggggtgttccaaagagaaggcctggtcagcagagccgccccgtgtccccccaggtgctggaggcagactcgagggccgaattgtttctagttaggccacgctcctctgttcagtcgcaaaggtgaacactcatgcggcccagccatgggccctctgagcaactgtgcagcaccctttcacccccaattaaacccagaaccactgctctgctctcctgtgtctcatttctcctcagggaagcatagtggggaagatgtcgtggggaggggatcatagcccccccatcctaagggtcccagctgcaagttctcccccgaggcttccccttgccctgggccagggggagtcacagcagctggctcttggggacatgggcactgtccagctgcccagcaccctgagatctgcttccctgccatctcaggggcttccagaaggttcgtgggtccaacccggcacctggcccagcacccattgcagctgcagttaccatgacaacagggccctcccggactggagggggctcctgcagggagggggatgggagcagacatggcttttagtgcctgaaggtggagcagagggaatcctggggtgggtggcggggagatggggtcccccgccagtgtgggggctgtggatgtggcatgcctgacccccatcccctgttcagtcggggggctgtgggtctgatggagaagtggttattcctgcatgccctgttccccctccacttgatggggaccagcccagattgcgggggtgcctggctggcagagcttagggacctgagcaactaaagcccggccccaggggacctcccctcccccaagcgctgagtttctaataaaggccaagcctcataaacaatcacctgtgcccgctcccatctggctggcttcgggagcaatcgctcattcgcctgctgcctgcctgccggagcatttgtcattaggaaggtttaatgggtttcctctcagctccagagggctggggagagccggctgcatggatacaccgccaggcagaatgttctcccatcgcctggtggaggggggttgggagtgaggcagccatgccaccattcacaccaacagttggatgtggggttggggaagtgactgcacccctcctggaacagtagaggccctgggtctggaaggatcggaaattagtggctggggcccagagggtttgctgagttccactccagggtgaagaatgggctttgtgtcctgaccatcagcagcagggcccagggaaggctgtgcatcgttctgtgtgggagccgctgcccccacccgtgtgtatgtgtgtctgcgtttgcccaagaatgtgtggggccatgtgactggtcgtctctctgtcctgtgcattttgggagtcctccggttctgagagtcctccggttctgagtgtgaccacctgcccctccaggtacccccttcccttgtctgtctgtgcagtggccaaaacccaaatgagaatgtcgctgttaggtaaacatgcctccagagcccacttcggggccggtgattcattattaagcagctgcgcattccctcacctcccacccaccccctcaccccctcctgtctagaaccagggcataaatcccaggcctttaggatggtgacagtgtagtcttccctagtgccacttacaggcacctcccaggccagacccgccccagggggtcagtctctacgtgcccctggcttctgtggccgctgggcagagctggagcaggtcaccttggggtaaacggtattactgccccaggacaggagttggcttcgctgtgcccacgtccatgatgagaggggaagtcagtgagttagcagtggatagccgaagacgcacacagattgatcctggcctgggaaatgttagtctgcctgcccatccttgtttgtaacaaaagccacaaactcaaaaggagctctgagcgtgtgtgtgtgtgtgtgtgtgtgtgtgtgtgtgtgtgtgatctctctgaggacctgatacagatgtgatggacacacccacacccagccctaatctcggtgtgaggatgtggctccccagcactcagcatagtgtggacacagattgtggacctcagcagcctcaattctccaccttactttaggagaatccagtatctaaggccgataaactacctcgtcccctcactgtggagactctctgcctccaaataaatgtgagttgggggggatacagatgttctaggtgtcctggctttgtgctgcttttcatttcttcagcaggtacagggtaaagtgcctctccacatgctaatccgggaattaatcctttttccgatgtcaaacatattcgcttaaatggaaattaattgcttttcttgaggatttctctaaaaattggttttaaatgagtacattaggcagtcccatttattattcgttggtttcgttcccaatatggccccggtatccgagttcccggagatgccagcacggagcggagatgatttaatcagggtaaccattaattagagatgaggagagcctcccccaggaggagtgggagtgccccctttgtggcctcagcagggtggcggtctgggccaatagggctctttaaatgattgtttctgctctggattcaatagggaccaaccactggggtcaacatggggcaggatcacctgggcagcaccccctaccttcattcttggtccctcagccccaagggtgacgctcctcacctttcttgtaccccttccaactagcctggctgcaccccttaggtctgcctcatgcaggccttcagacaggcctggctcgtataaagccctcatctggttcttccccttctgtgacttcccttcccctgcctttagccagatctctaaggctgctgaggacttagcgtctccttttttattttttagattgagacaaggtctcactctgtggcccaggctgcaatgcagtggcactcatggttcatggcagcctcgaactcttgggttcaagagatcctcccacctcagcctcccgagtagctgggactataggcgcacgccaccatgcctggctaattttgtaaaatttttttagagacgaggtcttgctatgttgcccaggctggtcttgaactcctgggctcaagcagtccttccccctcagtctcccaaagtgctgagattacaggcatgagctgctgcatccagcctactcctagttcagtcccttcctgtctccctcatactcttctttcctgcctccaaaacttcttgtcttttcctctccttcccctccaagaattctggtcccccatcaagggctgtccctgcccaatccctcctgcaggcaaacaggctccaggtgtgaggtatgagtgtgttcaattgaaggcacctgagtgcccctttaaaaggctgtttctagcttttttgggattagtttactcggcacaaatgtgacttgtctaaaaacgatttttgaaattacaaagcaacaagagaaaaaagaaaatggaaaaattcagctgggccctactctttcatactcagcttcttaaaagccagctcgattgttaaaaacccattaaaaaattgccagactggccgggctcagtggctcacgcctgtaatcccagcagtttggaaggccgaggggagcggatcacttgagcccaggagttcaagaccaccctggacaacatggcaaaacccccatctctactaaaaacacaaaaattagcctggcatggtggtgcgtgcctgtaatcccagctactcggaaggctcaggcacgcgaatcgtgtgaacctgggaggtggaggttgcagtgagctgagatcatgccactgcactccagcgtgggtgacagagcaagactgtctcaaaaaaaaaaaaaagaaaaaaaaaattccagacctcttagtaatgcatcaacagtgattgcagagtggcaatccagtgacgggagaatactcatttgaggccagttttcattgctgtgctagaattctcggttgttttgatcaaactgcttttaaacgaattgctttcgatcaaaacaactttggattgggtctcctcacccatctccccaaagggctggccctggggaaccccttccccccagttcgcttaagcttgagtcatggaataaggggatcctcactggagatgggtctccaggcttggacttcggggccacctccacctctgtcgccattggacacacacagtcaccgaagcgtcaaatgtcaaaggtcctgtttattccggcaaaccggaaagaaaaagtgtaaataaaaaaagaaacagatccatgcactcaactcctgggggtgggggtgggggtgggagtgagggatgaggaatgggtgggaagcaaggagggaggggtggaaggacagagagagagagacagagagaggcagagacggaaagaactggagaaccagagccataaaaagaaaaagacatccataaaaaggcagaaagaaagaagtggtgtattaaaagcagagatcaataaaggagaagaggggaaattgaaaaaatagacagaaatacataggcagagaacaaaagcccagcaaaaaggcggggagaaagggcgtgacagagacagagagatcacccttgagggacacaggcagaatgaaaagggcccccagcccccagaggccccccaggcagcagcccgagccacagcattggctcaggggtccccagaggtgctgatgacgtgaaacagggtgacattgtagagcacctggtggccgttgttccaggtatagagggcgcgctcccgggggttgtaatccagcatcgagatgtgggaatactggttgtggaagggcacgtccgtgtactcgtaactggacgtgttggtaaaataggcgaagtagaccttggccccagccaggtgggagttggtcacgtagagcacaccgcagatcatgaaggcctcgccagcgctgcgcttggggtagccggtgtcccaggaccgcatgacctcgagggtgtgcgggtccagccggctgaccacgatgttgcccgcgttctggttggtggtgtacacagcccagagcccgctctcgtccaccatgaagtccatgtcggagaagccgccccaggagtaggggaaggtgttgttgtaaccggcgcccgggaggctcctctgcaccagcacagagcgcgagcggaagtggtatttgaccaccacgttgctctggtacttgttatagaacagggagccgttgtacaccacgtggcccgtgcccgcccacggctggggcagcaggtgctggataaagttctggcctttgatgaagtctcccagggtacggaactccaggacccggcggcctttgtaatagccatccatgtaccagacctatggtagcagccgctggtcactggggggaaccaccaccaacgacccaagggtcccagcaccagctacagccattagagttcaacagtcactaagtggtcattagtcatgggaactctgttgaccattcattaccaattatggccctagtgtgaccatgatcatctcctggtgacagcattaaccatgggcagtgaattcaagtgacgtcttatcactcaatggctgtccagtgaccactaaccacccaatatccaatgaccagggaattcctgggcccagtgagtccccaggggctgcagtttcttggggaactgcatggccccagtaggacccaaatcccagtgagtgctattggtcttttttttttttaagtaatttttttttttttttttgagatggagtccctctctgttgcccaggctggagtacagtggcgtgatctcagctcactgcaacctccgcctcccaggttcaagtgattctcctgcctcagcctcctgagtagctgggattacaggcgcatcccaccacacccggctaatttttgtatttttagtagagatggggtttcaccatgttggtcaggctggtctcaaactcccgaccttgtgatccactgtctcagcctcccaaagtgctgggattacaggcatgagccaccacgcctggcctttttttttcttttgaaacaaagtctcactgtttttcccaggctggcgggcagtggcacaatcacggctcactgcagcctcgacctcccaggctcaagcaatcctctcacctcagccccccggaatagcagggactacaggcacaagtcaccacgcccagcttatttattgtatctttagtagagacaaggtctcgcaatgttgcccaggctagtctcaaactcctgagctcaagtgatctgcctgcctcggcctcctaaagtgctgggattacaggcgtgagccactgcacctggccactattgatcttaaaacagaccctaagtggacaatgctccatcccaaaggacccagggaactgcagcccctggggagtcactgggcccaggaattccctggtcattgaatattgggtggttagtggtcactggacagccattgaatgataagacatcacttgaattcactgccatggttaactaacccctgtcaccatgaggtgaccaggcgtgtcatcaacatcattgttgtcatcatgttaactagcatttgttgttgtttttgttttgttttgttttgagacagagtttcactcgtgttgcccaggctgcagtgcaatggtgcgatcttggctcactgcaacctctgcctccagggttcaagtgattctcctgcctcagcctcccgagtagctgggattacaggcatgcaccaccatgtccggctaattttgtatttttagtagagacagggtttctccatgttggtcaggctggtctcgaactcccgacctcaggtgatccgcccacctcagcctcccaaagtgctgggattacaggcatgagccaccatgcccagcctcatggatggttcttgtgtgtctaagtgatgggcagtcatgaccatggaagctactagaagtccgaaggtcactgagcagtgcttggtggaagaggtctcttgtccttgggagggcattggtcattgggtagttacttggacgtcagtagtccctgagaactggtcagtagaactcagtaaccattagccactatacagacactggaggtcaacagagtgggattcacaaggctgcaaagcccttggtcacttgggggttactggacagggaggtccaatggccctgggggatccaggacactttgggctacaagacagtcaccagtgtggactccctaggcacctatgggcagtcaaaggctctgtccctcccaggccctgaccccaggggtgggcgcagtcactcacccggctatccgcactgggggccatcgtgtcagtcatccaggagccgaagcgggaccccatggcccgaacggtgatggggttactgaccccggtcagcttcccacagcctgggaggcaggaacagggggaatgaggatggggaaatgaacagcccaagagaggccaggcaaagatgaagtgctgtgatcaagttgggaaagctgggaccagggatgagggaagactcaaaaatctggtcccaatatgttgttcagttgtgagtgaggggttagaggccaagggtcagggccatttccagcttctggactcaagtgtagccttaggtaggaaggtcaagggttgaggtttaaaagttagaggtcaaaactgtgtccagcttctaggcacaaacaggtgatactggagttgggtgtggcagtcagagatcaggggtcagggtcaagggccaaggcatacccagcttctgggcgcaggcgtggagccgggcctccagggccatcacccgttgctgcaggtcctcatacccgtaggcacccatctcctcctgaatggccgccagactgccggagagattcctcacctcctcccgcaagcgtacaatggtccgcgtgtctgccttgtactgctccaggaccgagctcaggggcaacagttccgtcatcctgtccttcagctcctgtgcatcaagatggaaccatggccaagcctgacccctggcctttgacccagacatgactccaacctctgactcataacttcaccctttgtctttgatgcacacctggcccttgacatgtggctcatattggaccctagattcttcccagacatgactccattgtaggaactaatggataccaaatcccagtcatttgtttgacctctggtctggacacaggaggacccacctggaagctcttggccgagagggacccatcagctgcccggagccgcgcatccaggctccgcatgagggtctccatgccgcgtacatactggaggtcgcgatacgtccgcaactcaaggacctccatggactgggagacgttctggacctaggaatggggacaactgaagggaccagacctccttccccaaatcccaacccagagatgccacagacaagagctggcaggaacagaggctgtacaaacaccacaccgacgaggccaccttctcctcccctgagcttaccagcagcctcccaattgcgtgcccaatccatccatccatcgctccctccctactacccactggctcccatctggtccacctaccaccacctctcacctcctccctagtctcccagttccaccttcatcccctgtagtcaattctctacacagcagacagaaggaactttcaaaacagagattagatcaccttcctcctccacagatcctgtgctggctggtcctgcccaccccccccgcccaacccacttcctctctctttgttctcacagactctaagctccttccttctgcagggtctttgcacttgctggtctctctacctggagtgctgttcccccaagttcccatggctggctccttctcatccttcagggttcagctccagcgtcccccactcaaagcatccttccctgaccaccctgtccggtagccgctcactcactctcctcttgcctggtcatttccttcccagctgtgactatgtagaacattcttatccatctgcctccttcaggtgggaccctcagaggcagaggctgcgtctagcttgtccacagcttaacctccagtgcccagcactggcctggagtagaggcccaataagtattttttggctgaatgagtaaaataaacttcccttgccctggcctctcctgacccaacctgagagcacccagctcccacctccacctggctacggtgaactccacctagataagttgaactccccctggctaaggtagactcccatctgactaaggtgaacatctggctaaggtagccaccttgttaaggtgaactccatctctggcttaagtagactctcacctggctaaggtagactccagctggctaaggtgaacacctggctaaggtagactcccaccttgttaaggtagactctcacttggctaagatgaacacctggctaaggtagaccctcacctggctaaggtagaccctcacctggctaaggtagacctttacctggctaaggtagactctcacctggctaaggtagattcccaccagcttcacctgactaaagtggactctgcctggctaaggtaaactcagtcagagttaccactggatgcttgttgaaatacagactttcctgtacaattattcacatgacacttggaaactcccagaaactcagcagcctaatacccaccctgaacgccacaaaacatttttacatactcttcccttctccacagtttcacgtttcagctacctgaggccaaccacagtccaaaaatattaagtgggaaattccagaaatcaacaatttgtaagttttatttatttatttatttatttatttgagatggagtcttgctctgtcttgcccaggctggagtgcagtggtgccatctcagctcactgcaacctccacctcccgggttcaagcagttctcctgcctcagcctcccgagtaggtgggactacaggcacacaccaccacgcccggctaatttttgtatttttggtagaggctgatctcaaactcctgacctcaagtgatacacatgcctcagcctcccaaagtgctgggattacaggcgtgagctaccacgcccggcccaggggactattttctcttgaccatgatcagaggtagaaggaaacttttataggagcctcttgaggtggagggttagaccctccccaaggggcacagaactccttcttagtaggtgagtctggtgaactgcaaagctgggtgggacatgcctggtggaccagagctcacacacaggagactcagatgctgcccctccagtcttccttccttccccccaccccaatcccagtaagtgcttggcttctctcccaaaaaagcattgaacaggcagggcgcagtggctcacgcctgtaatccccgcactttgggaggccaagacaggcaaatcacctgcagtcaggagttcaagaccagcatgactaatatggtgaaaccccatctctgctaaaaataaaaaaattagctgggcgtggtggcacacgcctgtaatcccagctactcgggaggctgaggcaggagaattgcttgaacctgggaggtggaggttgcggtgagctgagatcgcgccactgcacctgcactccagcctgggcgacagagtgagactgtctcaaggagaaaaaaaaaaaaaatacattgaacagatattggataaagtatccatctgggcatggtggctcacacctgtaatcccaacactttgggaggctgaggcaggaggatcacttgagcccaggagattgagaccagcctgggcaacatagggagaccccgtctccacaaaaaatataaaaattagggcatggtggtgcatgtctgtagtcccagctactcagaggctgaggagtggggattgcttgaacctaggagtttgaggctgcagtgagctgatcatgtcactgcattccagcctgggtaacagagtgagaccctgtgttaaaaggaaaaaaaaaaaaaaaggacctgcctggagaggagctggattatcagccagctctgaataatttgcatagctggatatggccactggctgacctggatggggctggagggcggggtgagaactgggagattttcccagctgcccccagggtacctggaaggttctcaccttctccatcagttgccgcagctcccgactcctgccatctcgagagcaggtactctgcgctgggatcacggccgtgcagatgcatttcccgtcaggggcctgggctgaggtgtacagctgccagccctcttctgggttctggaagagagtctgcaaagaggtgggggtcagagaccggaatcccagtgagggtctcgcctcgccctcactgggacaggaagggggcccaaggaaaccacagatgccctttgctgggctccgggcatatgccagtgcctgttgtgtgtgatctcaggccctccttaaggagcctcatttcacggatggcaagactgaggtgcggagggcttaaggaacacggcaaggaattggaggactcaaatcttctccaagaccagaattcattctctcacacagatttgcacgcacacaacactgtctctgtgactgccattagaacagagatccactcaaataacccccaaacctggacctcctctctgcttccccagcccacagtgacatatcggctctggagctatctcagggccacttaatgtttttttttttttttggtttgttttttgttgttgtttgtttttgagacacagtcttgccctgtcacccaggctggagagcagtggcgcgatctgggctcactgcaacctccgcctgtctccaacacctggcctccactccagcctgggtaacagagtgagaccctgtctcacaaaaaaaaaaggatctcacctcaggtgatccacccgtctcagcctcccaaagtgctggcattacaggcgtgagccaccgtgcccggccatcagggccaccaaatgttaagtgcaaccctgctgtgcccccacctcacctggagccacccaggcaaagtgatggcagacaaaatgctcagataatccagtgaccaattatggctttgtttcccaagccatactccttccaacactggtaatcttaccaggtgtgctgggaaaaggatgctctgtggtcaaataaatgtgtgtcactgggtgaaacaagttttgttactgcaggacttatcagaggcttagaaatgcaaataagtaccagggaactctagacacaaatcataaacttccaaactgattagaagacacccctgaggcaggtggatcacctgaggtcaggagttttgagaacagcctggccaacatggcaaagccccatctctactaaaaatacaaaaattagccaagtatggtggcgggcacctgtaatctcagctacatgggaggctgaggcaggagaatggcttgaacttgggaggcggaggttgcagtgagctgagactgcgccactgcgctccagcctgggcgacagagcaagactccgtctcaaagaaaaaaaaaaaaaaaaaaaaagaagatatccatgagagtctcttctgtcccaggcatagggtctgggataggatcaaggaagagaaggaatgaagaaaacatctggtggttgtccatggagctactaggagagacggacatcaaccacttaatgccagtgatacttctagaaccacatgctgcagtgagtgctttgaagaagtagtgcagggagtaacagggggtcttccctcaggctgagggtctctgaggaggtatccaagagaatgggctcttgagatgaacttgagggacgagtgagacagaagaaaaggagaaggcaggggacatttctatcattacaaatcctgatcaatgtctggagggacccaggaatggtggctcacgcctgtaatcccagaatttcaagaggctgaagggggcggatcactgaaggtcaggagtttaaggccaccctgggcaacataacaagacctcatctatactaaaaattaaaaaaaaaaaaaaattagctggatgtagtggcatgcacctgtggtcccagctactcacaaggctgaggcaggaggattgcttgggtacaggaagttgaggctgcaatgagctatggctgtgccactgcactccagcctgggtgacagagtgagaccccatctcttaaaaaaaacaggccagacgcggtggctcacacctgtaatcctagcactttgggaagtggaggcaggtggatcacctgaggtcaggagttccagaccagcttagccaacatggtaaaaccccgtctctactaaaaatacaaaaattagccgggcatggtgatgtgcgcctataatcccagctacttgggagcctgaggcaggagaatcgcttgaacctggcggggtgggggcagcgagccgaggttgcagtgagccgagatcacaccactttactccagcctgggcaaaagagtgaaactctgtctcaaaaaaaaaaaaaaggatgtggggggacgtgagggttgtggggtgactggcttgggcttgcacacgtaggcgtcgtttgttcaaaacctgaagtctttgttcaagacctgaaggaagtgagggaggagccatttggatgtctggggaaggggttccaggcagagagaacagcaagtagaaaggctgaggcaggaccatgcctggtgtgtttgtgaaacaaggaggaggcccatgtggctggagcagattgagtaaggggtaagtggaggcagatgagagaagggaggtgatggggcaaggccttgtgggaagcagtgagggctctgggttctgccctgaggaaggtgggagccatggagggttctgtgcagaggcgagacgtgaccttacttgggtgttcacagtgacctctggctgctctagggaacgagggagggaggccagggcaggggtgactgcacagatccagacaggtgatgatgggtggtggccatagaggcggtaaatggaagattctggtcctattccaggatgcattctgacaggcatggaagaaattctgattaaaaaaaccccagtgttttacagagaaacaaagcaccacaatcattgatcatttgcacagccattactagatctcccagcagaatcggtgccgtgagctgcagcacagataaaccaagctgtgaattatgagcgatcccggggactccaactattagcccacctttttctctcccactcaatcgagtctttttttttttaaggcttattggaatatgagcaaatgatataattgtacaaattatacagatgagcttgactcccccactaatctataaggaaaacaaaccattcataaacgccagctgaaactattacagtcagtcattcttcgagcctttgtacacccttcctaaatggggggaaccccctctttgtaagttgcacatcctcagccctggcagcggagcacagtaactcactttctccgccttccttgtactcaggtaggagctgggtggagctaacattcactgcaggtgtgcccaggattggccacagccaagagctttctctggtggtcatatcccaccctgcccttgcatggggccagcagaaaatacacccagcaatcctcagagatgacctacaggcattcgtgattaataccacccctcttgcctctccagtgggaaagaactcgaaggtgtatgttcatgaaatcttccagggcaacccattagatttacacctcagttgtccacagcagcaacctgctcattacttctcttttatttattcgtttattttattatttttcatttttgagacagactctcgctgtgtctcccaggctggagggcagtggtgcgatcttggctcactgcaacctccacctcctgggttcaagcgattttcatgcctcagcctcccgagtagctaggattacaatcacccacctccatgcctggctaatttttgtatttttagtagagatagggtttcactatgttggtcaggctggtctcgaactcctggcctcaagtgatccgtccaccttggcctcccgaagtgctgggattgcaggcgagagccattgcgcctggcacatttatttatttttttaagatggggtcttgctgtcgctcaggtctgggtcttgctgtcacccaccactggagtgcagtggtgcaatcctagcttactgcagcctcgaactcctgggtttaagccatcccctcccacatctgcctcctgagtagctgggcctacaggcaggtaccaacacacccagcttttttttttttttttttttccttttgtagagatagtcttgctttgctgcccaggctggtcttgaactcctgggctcaagcgatccacctgcctcggcctctcaaagtgctggtattacaggtgtgagccactgcgcctggcgtactcattaagtctcccggcacgggtttccttcacctcctctctcacttcactgctcccccactggttcttcctggggtatcttaggtggatacctgcacttaaatcctccctgaaagagcctgacctaagacaacaaggatggcccagtacaagaggaataccccaagaaagcctgcccctttggttctgggaggatccagaactactctcccacctcccttcttcttcttctcctctttttttttttttggagatggagtctcacttggtcacccaggctggtgtgcagtggtactatcagggcttttggcagcctcaacctcctgggcttaaatagtgattcctcccacttcagcctcccgagtagctgagactaaaggcctttagtctcaccatcgcacctactaatttttaaatttttttgtagagatgggagtcttgctatattgtccagtatggtctcaaactcctgggctcaagcgatcctcctgcctcagcctcccaaagcactgggattacaaggcatgagtcactgttacctctctgttttttcttttttttttttttttttttttttgagagggagtcttgctctgtcgcccaggctggagtgcaatggcgggatctcggctcactgcagcctctgcctcccaggttcaagcaattctcctgcctcagcctcccaagtagctgggattacaggcatgcaccaccacgcctggctaatttttgtatttttagtagagacagggtttcgccatgttggccaggctggtcttgaactcctgacctcaaatgatccacccgccttggcctcccaaaatgctgggattacaggcatgagccaccgtgcccggccctcccttcttgataaatctcattcttaaaaaaaaaaaaaaaaaacaaagaaaaacatcaaacaggagcccaagcatccctgcccctcctcccctggctctagtccccaagcaatttggatagaaacccccaaggaatatcttttgtgcagagacaaagccgccggttcaacgtaattaacatcttcctacattgcctagcgtgtccgttgaagcaaataagccattttctctcgacagaggaaatattgaattgtaaaagagaagcaagatttaagtggtgcagagagaaggcctccatggttttcctaaaataattgtctgcgttggacgcatctcaccggagtgttctctgcagcagtgtaattaaatgcctgggttttggctgccagatcgcagcaggcagaggtcctgagttttgcccattgggtttaagttcagatatgcagttaatgcatgtccctaggaaccgctggaatgttctggaatgtaccatgtgctagctctcccagactgggtctagcttggaaacaaagtcaagagttcttggcagtcagaagactagagaggaacagagagtgtcctactctaggggaaatgcttacaacagcaggtgcaagaacacaggcgttctccagcatagaagtctgtggtctagcagcctgtctcacctcggatgtggcagatgtactaaagaagccaacccacttttttttttttttttttttgagacagggtcttgctctgttgcctaggctggagtgcagtggcatgatctaggctcactgcagcctcaacttccctgactcaagcaatcctcccacctcagcctcccgagcagctgggactacaggcatgcaccatcacgactggctattttttttggtagagacggggatctcactacatttcctaggccgatcttgaactcctgggctaaagtgatccacccgccttggcctcccaaagtgctggaattataggcgtgagctatcacgacggccctgccaacccactctctctttgctgagctcttggttcagggtttaatattcctgctaatgggctttaagggagtgaagctatgcactcaagtatctgttcctcaaatgtcttttctggctgaaatcttacaaacacttttgctgaggctgccctaattaaacaccagcctctaaaacaggtccaggattaactgagtaggacacaggcagggaaagctgttcttgctgtcgggccagggatcatcatctcctactactccaccacctatatcttggttcaaaaacaattcctggtggccaggcatggtggctcacgcctgtaatcccagcactttgggaggtgaaggtgggcggatcacctgaggtcaggagttccagaccagtctggccaacatggtgaaaccccatctctactaaaaatacaaaaattagccagacgtggtggcaggcacctgtaagcccagctactcaggaggctgaggcagaagaattgcttgaacccaggaggcagaggttgcagtgagccgagatcgtgccattgcactccagcctgggcaatagagcgagaccccgtctcaaaaaaacaacaataacaacaacaaaaaaaaacaattcctggtgtttccctggggacggaggcattgctacagggtcctggggacaggagaagcattggctatcaggaagtagccaacaggaagagagcaagcgcctgcctcttaataaaatgaagctattattgtgtttgaggctggataatttaatcaggaagccaaggcaccttggggcttacatatttatttgtgccctgccttgttccagagaggactctaagtggtttacaaggatatgtaaaataccataagatagcgccaattaaatatgagagcggggattagatatttttggaggacagcctgccagtccacagccaagccattacagtttctgcaatttgcattttattcggccaatccaaagctaagaattcagcccatggaaactttgtggacagcatctgattgttgcaagggaggttcattaagcattgtttaaaattggacaattagaaattaatttgatcaaaagctattacacatgctagaaaaaaaattttttttttttggagacagggtcttgctctgccacccaggctggagtacagtggcatgatcatagctcactgcagccttgatgtccaaaggctcaagcgatcctcccacctctgtctcctgagtaggtgggactacaggtgtgagccactaaaccaggctaatttttttttttgagatggagtctccctctgttgcccaggctggagtgcaatggcgtgatcttggctcactgcaatctccacctcgagggttcaagtgattctcctgcctcagtctctggagtagctgggattacaggcacctgccattatgcccggctaatttttgtatttttgtagagacgaggtttcaccatgttggccaggctggtcttgaactcctgacctcaggtgatctgcccgccttaccctcccaaagtgttgggattacaggtgtgagccaccacgcctggcccaggctaatttttaaaaagattttttgtagaaacagggactagctatgttgcccagcctggtctcaaattcctgggctcaagcagttctcccacctcagcctcccaaagtattgggattacaggcgtgaggcactgtgtccagccaatttacaaatttaagatgcatctacagaatgagatactatgcagtcattaaaaattagagattaatggagattttaatcaccatctttaaatttatcttattttccaagttttctacaatgaacgtgtattgttcttataaagatttttagggccgggtgcagtggctcacgcttgtaatcccaacactttgggaagccaaggcaggagaatcacttgagcccaggagtttgagaccagcctgggcaacatagtaaaacctcatctctacaaaaaatttaaaaattagcatggtggcacatgcctgcagtgccagctactcaggaagctgaagtaggaggatcacttgagcccaggagttcatggctgcagtgagctatgaaggcgccactacactccagcctgcgtgacaaagtgagaccctatctcaaaagaaaaaaaaaagatttttaaaagtcccttaaatttttttttttttttttggcaagggagaaaaagaagaaaaacaaaagcagggacataaaacagagccagaaacgaggctaagaaaaactcatcccttaaaaacctgaacaatcagcatatggccgggccataagtttggctccaagctccttagcagccaactcagaaagggaaagctggtcatttatgcggttctcagtgtcctgaaacaaaagtacaccagatgctcaggagaaagctcaattatttttggcagggatttctcccacagtcctcccaaaaaggattccacgtgatgtcaccagcatctctccgggcaatatccttacgatagaagtgactagtttcctctagatgtttcttattcctcctgggatggtagagtagggccaactggtaagagcagggtcctggagtcaggctgcctgggtttaagttctggcttcaccattcgcttgctgtgtgacctcagcaagtggcttaacctctctgtgtctttcttagttttttcatttgtacaatggacatgatgactacctacttctctgggttgctaggaggatcaaatgagttcataatatatataagagcaattagaacagtcatcagcatgtagtaagagctacacaagtgtctgctaatactattatttttattttttaagagacagggtgtcactctatcgtccaggctggagtgcagtggcacaatcatggctcacttcagcctcgaactcctgacctcaagcgatcctctggccatcagcttcctgagcatctgggactacaggcatgtgccactatgcccagctaattttttattttttgtagagatgggagtcttgctataattgcccaagctgtgtttgaactcgtggcctcagacagttcctccagcctcagactcccaaaatgctgggattacaggcatgcaccactgcacctggttaattttttaaaatatttttgtagagacaggatcttactgtgctgcccagactgctcttgaactcctggcctcaagcaatcctccagcctcagcctcccaaagtgctaggattacaggcatgcaccactgcacctggttaattaaaaaaaaattttttttttgtagaggtggagtctcactatgttgcccaggctggtgcagcagcacgctcacggttcactgcagcctcggattcctggcctcaagggatcctcccatctcagcctcccaaagtactgggattactggcctgagtcatcacacgctgccctgctattattatcttcataacactcaaaaggccaatttggtaacttcctgaggtcaaacggtgtgagtcttgacacaataaaaaggatctggcaaagtctcatggagttggggttgaggctgtgggatcatgaggcaaagaaagtccaacgagggagagaggagagtgagggatgagaggggacacttgctccatcctagtccccacgcggcccagctggcttccttttccagaatatctccttgctataacctggcagcaggggagccaaggtccttctccatccttacaggcactgaaccaggatgtaggcgcacactgctgtgttctctctggcccatcctctctaattgtctttcccttcccaggtcacaggatgcttattctcatctccaggcctttgcacgggccgggcctgctgccaatccccgcactctccccttcttagggccaggctaactcttccccatccccggggctcaagcgttcaggtctcttccaaaagcagtcttggtggtccctgccacgcgttaccctcctctcaagtcacccgggaggtggaggttgctgtaagccaagatcgcagtgagctgagattgcaccattgcactccagcctgggcaacaagagcaaaactttgtctcaaaataaataaataaatagccgggtgtggtggtgcatgtctgtggtttacagtggctcgcatctgtaatcctggcactttgggaggccgaggtgagctcaagagtttaagaccagaccgggcccagtggcttatgcctgtaatcccagcactttgggaggtcatgtcaggcagatcactctaggtcaggagttcgagaccagcctggccaacatggtgaaaccccatctctactaaaaatacaaaaaattagctgggcatggtggcgagagcctgtaatccccactactcaggaggctgaggcaagagaatcacttgaacctaggaggcagaggttgcagtgagctgagatggtgccactgcactctagcctgggcaacaaagcgagatcctgtctaaaaaaaaaaattatataaaattccgggtgctgtggctcacacctgtaaccccagcacttcgggaggccaaggcaggcggatcacaaggtcaggagttcgaatccagcccgagcaacatggtgaaactccgtctctactaaaaatacaaaaaaattagccaggtgtgctggtgtgctactatgatcccagctactcaggaggctgaggcaggagactcgcttgaaccctggaggcgaaggttgcagtgagctgagatcccgccattgcactccagcctgggccacatagcatgactctgctctcaaaaaaaaaaaaaaaaaagctctttgccaaagcatcactgcctgtaagtgatgtagctggaattcgaacacaggccatctggttacacagtctacactggcttgcggcacctctcctgtcctcctccaagccctgatcacagtcgccattaggagggcctcacgggtgggaatgctggctccaggcctgcctctaccctgggaaaggaaaccacaggggagcggggagttttgtttgctgtgcaaacaattcatccgtgatcctcagaacctggcacaaggtatgtttgttgaatgaggatgctgatgaaccagtgggacagagagcaaacaccttcacaggtctaccgtgaatttctcctttctgccacggagcttgcttctgttgttcgtcctagggaaggatcacctgagattaggctgcagacaggtgcccagtaggctaggcagaggctgtggcttctctctgactgcgagaatggcaggagggccgtgatgaatgatggagaatgtgcctgtctgctatgtctgagccgtgacagggggccacgtccctttggaaagcttgagataatagcagcctgctcttgtcaaaccttgaggtattgggcaaatatcccctgagtgataagcttgacaggccttaaagaagatatcagccaggcgctgtggctcatgcttgcattcccagcacttcgggaggccaaggcaggcagatggcttgagcttaggagttcgggaccagcctgggcaatatggtaagaccctgtctctaccaaaaatacaaaataatttagccaggcatggtggcacgagcctgtggtcccagctactcagaaggctgaggtgggaggatcgcctgagcctgggaggcagaggttgcagtgagccgagatcacgccactgcactccaacctgggtgacagagcgagaccctgtctcaaaagaaaaaaaaaaaaatattagttcacccgcgccatgctggaagcctgggaaccgcctggggcctccctcagcctgagaactggggttttgcctggaagagccttgtgggtcggggaggggtcaggatagaaagtgattgtgaatccacatattcattcatccatccattcattcacctttccacccattcatccatctatccattcattcataaaaccaaccatctatccatctatccatccattcattcatctgctcatccatttatctgtttacccattcattcattcatccattcactcgtattcattcatccaaccatccatttatatacatccatccatctatccatccatccattcattcatctgtccatccatccctccccaagctctactcccattctgaatttcatattttacttaacacttgtagagctcgctcttcttagttgctttacaaatattaccaaaattcaatccttagagccccatctcatggtaggtactaacactagctccattctacagatgggaaaactgagatacagagaaaagtcaagttacccaaattcacagagctgggatttggatgccagcctatcagactctcagccactatgctgggaggacaagagtcacttccttcagggtctcactctgccgcgcaggctggagtgcagtggtgtaatcacggcgcgatcactgctcactgcaacctccacctcccaggctcaagccatcctctcatttcagctccctgagtagctgggactacaggtgcacaccaccacgccaggctaatttttgtattttttgtagagacggggtttcaccatgttgcccaggctggtcttgaactcctgggttgaagggatccacctgcctcagcctcccagagtattgtgtttacaggcgtgagccatcacacctggccaacatttttggttttttaagagacagggtctcaagcagttgtccaggctggagtgcaggggcatgatcatagctcactgcatcttcagcctcctaggctcaagcagttctcttgcttcagcctccggagtagctgagaccacaggtgtgtgccaccacaccctgatactttttttatttttatttttgttttgagatagggtcttgctctgtcccccaggccgtgtcccacattggtgtgatcatggctcactgcagcctcaacctcccagactcgagcaatcctcccaccttagcctcccaagtagctgggactaccgatgtacactatcatgcccagctaatttttttttttttttttttttttttttttttttttgtagagacaggatctcactatgtttcccaagctagtctcgaactcctgacctcaagcgatcttcccatcttggtctcccaaagcgctgaaattacaggtgtgggccaccatgcctacctaatcaacttttacttttggaattattttaggtttacagaaaagttacaacaataatacagagagctcctgtgtacctctcatcctgacttccctgttattacatcttacataaccatgatacacttgtcacaactaagaaatcaacatccgtgcatccattactattaactaaactctagactttattcaaattccccagttttcccacttgagtgctttttctgttccagaatctaatgcaggatcccacgttacactcagtggttatcacatgtctttagacttatctggtctatgacgtttctgtcttgttttttctgaccttgacagttttgaggattactggccagggagttttggagaatgccccactggcctttttttttttttttttaagagagatgggggtctcactatgttgcccaggctagactcaaactcctgaccttaagtgaccctcccacctaagcctcccaaagtggtggcattacagacataagccatcatgcccagccaccaccggcttttattttatttatttatttttgagatagagtctccctctgtcgcccaggctggggtgcagtggagccatctcggctcactgcaacctctacctcctgggttcaagcgattctcctgcctcagcctcccaagtagctgggactacaggtgtgcaccaccatgcctggctaacttttctatttttagtagagatggggtttcaccatgttggccaggctggtctcaaattgctgacctcaagtgatccacccaccctggcctcccaaagtgctgggattacaggcatgagccaccgcacccagtcttttattttattttttagagacaaggtcttgctgtgttgcccagactggtcttgaactcctgagctcaagtaatcctcctgcctcggcctcacaaagtgctgggattacaggcatgagacactgcacccgtcccctaatggcttttgagggcaggaactgtggcctcactttgctggacgtttccccagcctgtaacccaatgcagtagctgcttcagacgcttcctaaatgaacaaatattgaatggccatcactgagagctttatcttcctgtgctccctgttccgcaggcatccctgccagaggctagatctagaagagttcacggcgaaataaaagcttttctcctttcagaaagatttgtttttgatcctttctttgtagacatcaaggattcatttctttaatatttaagggcttttgtaccaaagagaagcagccgcatttgcatcagtctcattttttcaaggcaggcgagagagatctttctagcaagatggggtttcttccttcacggagctgtcacttgatttatctgcttctccttccccagccttcatgcctctggcagggggcagggaagagcgagggttctggaatgatccacagactctgatgtcctctctgccacagcccaaggaagcttaattagaacctcgccaatttgctgggactgaggtggccttaggagctggtgcaggggcctggccggggatgaagatgaattagcagcttttttttttttttgagacaggctggagtgcagtggcacgatcacgactcactgcagcttcgacttccctggctcaggtgatcctcccacctcagcctcccgggtagctgggaccacaggcacttaccagcacatctggttgtttgttgttgttgtttttcttttgttttttgtttgttttttctcacagagacagggtatcgccctgtctcaaactcctgagctcaagcaatcctcccacctcggcctccccaaggtgctgggattacaggtatgagccactgcacctggcctgaattagcagttttatttcctgtccctctgaatagctcaatagctaccacggggaccaaaagcctgccttgggtacacagagcatgtcccttttctaacattagctggtcagaagtgggaatccctttagccatgcaggcctgcaggtctcactgctttttatttctcagccccaggaggccaagctgaaggcagagaatctaaagaagctgtcttcagcgaggtcatctccccgccaccgaggtccctactgctgggagacactggccccaatttaatctcttgcctgaagtttttcagacgtaaaaatgagcctgggtgagcttttcagatagttccttcaacttacaggaattcaatttctggcctggatataaatttgcagccatcagcgcccgtggtaggggctggggctgggcgctttggccggggatggatttctgaaatcaatccgtccgcgtgtggaaaaggtcgccatgggggacatttaacttccatggctggctgaggcatttcacaccgatagccagggacacccctatacaaaatggaagtgtttgctgcgagtcccccaggcagcggctggagggaggcctcgaaggctggacagcacagccaggaggtgacattgatcaacctgccaataacagacagccaggtaccaggactcctgaaaacccacctccaagggctctttcctgctaggtccccatgcgcccctgcgggtggcaagtccactctgggtccaaaccctttatcccttggctacacctccaacacacattccagggtttcaaagaaatgagtctcaaatgcattcaattcccccagtggaggtgggaggacgtggtcattaagggtctcctaggttcgagcctcaggtctgccgtgtgaccttgggctactgacttaaccatcctgtgcctccgttcccccagttagagtatatagctaagaatagtactgatgtcatgaggtggttgttaatatatcagaatggcttaacgtaatgttatggtttgaatgtgtccccgcaaaattcatgtgttggaaacgtaatccattttatttatttatttatttaaagtgaaagcaagtttattagagaagtaaagaaacagaagaatagctacttcagaggctgggtgcggtggctcacacctgtaatcccaacactttgggaggtcaaggggggcagatcacttaaggccaggagttcgagaccagcctggccaacatggtgaaatcctgcctctagtaaaaatacaaaatttagctgggcatgatggcgggcgcctgtaatcccagctactcgggaggctgagggatgagaatcgcttgaaccaggtaggtgaaggttgcgatgagccgagatggtgccactgcactccagccttggcgacagagtgagactccatctcaaaaaaaaaaaaaaaaaaatatggccaggtgcggtggctcacacctgtaatcccagcactttgggaggctgaggcgggcagatcacctgaggtcaggagttcaagaccagcctgaccaacatggagaaaccccgtctctactaaaaatacaaaattagccaggcgtggtggcacatgcctgtaatcccagctactctgtaggccgaggcaggagaatggctggaactcgggaggcggaggttgcggtgagccaagattgtgccattgcactccagcctgggcaacaagagagaaactctgtctcaaaaataaataaataaataaataaataaataaataaataaatacaataaaataaaaataaaaaaagtaacagtgttgagaggtagcacctttaaagatgaggttaggtgaattaatgccattatcagggaagtgggttagttatcatggcagtgggctattgacaacaagaatgattttggtccaatttcctctctctgtgtcacttttgccttcagccctttggccatgggataacctttgccagaggctggtgctatgcccttggacttcccagtctccagaactggaaaaataaatttttttttttaagaaagattaattaattgattattttacagatgaggtctggttctgttgcccaggctggagtgcaatgatgcgatcctgactcatcacagtctcaacattccaggctcagtcgatccccctgccttagcctcctgagtagctgggactacacacgtgccaccacatctggctaatttaaaaaatctgtgtagtcatggggtctggccacattgcccaggtgggtcttgaactcctgggctcaagcaacccttccaccttggctgcctaggtgctcggattacaggcgtgagccaccacacccagccctttataaattacccaatctgtggtagtctgttatagtaacagcaaacaggccgggacacatacgcaacgtgatattcaagggagtgtgacagaattgcctatggaataaaaataagcaaatcggtgctgactgggaacacagaaaggtgggctggaccatctgagcttcaatcttggctctgtgttaccctggacaagtgactctctctgagcctcagtttcatttctctctttttttttttttttttttttttttgagatggagtttcactcttgtcacccgggctggagtgcaatggcacaatctcagctcactgcagcctccacatcccaggttcaagcagttctcctgtctcagcctccctagtagctgggattacagacatgagcacctggcatcagtttcatttctcaaacagggaaactggcagtaggtgatgagatgaccctgtcggcattttgaggctccagcgagctaatacaacggaagtgcttcaagccctggttcagagagagtgctcaggaaataccagtggctgttttccagataggacagcaccctccacagcttccccacattcacagataagcaaggaagaaagaaaaaggaagaggcaattataacagggtgtgataagtgccacgatgcagggaagcacagaacactggaagacctgggctctatctctgggctccagagcctgaattttttgtttgcttgtttgagactcggtagcccaggctggagcacagtggcgcagtcatggctcactgcagcctcaacctcctggactcaagcgatcctcccacctcggcctcctgagtggctgagtgatagggtctggatttgtgtcccgttcaaatctcatgtcaaattgtaatccccaatgctggaataggggcccagtgggaggtgactggatcatggggctaggtttccccttgctgttctcctgataaggagtgagttcttatgagatctcgctgtttgtttgtttatttattttgagacagtttcactcttgttacccaggtacaatggcgcaatctcagctcgttgcaacctccgcctcccgggttcaagcgattctcctgcctcagcctctcaagtagttgggattgcaggcatgcgccaccacgcctggctaattttgtatttttagtagagacggggtttctccatgttggtcagggtggtcaccaactcccaatctcaggtgatctgcccccctcggcctcccaaagtgctgggattacaggcgtgagccaccgtacccagccaagctctcgttgtttaaacgtgtgtagcacctcccccagtctctctcttgctcctgctctggccgtgtaaaacccgcctgcttccctttcaccccctgccatgaatgtcagtttcctgaggcctccccagctatggttcctgtacagcctgtggaactgtgagccaattaaacctcttttatttataaattacccagtgtcaggtatttctttatagcagtatgagaacgaactaatacactgggactccaggtgtgcgccaccacgcctggctaagttttttaatttttaaaaattatatttaaatttttaagagcctgggctatgttgcccaggctggtcttgaactcttttttgtcttttgaggtggagtctcactctgtcacccaggctagagtgcagaggcaagatctcggctcactgcaacctccgtctcctgggttcaagtgagtctcctggctcagcctcctgagtagctgggactacaggtgcacaccaccatgcctggctaatttttgtatttttagtagagacaaggtttcatcatgttggccaggctggtctcgaactcctgacctcaggtgatctgcccacctcagcctcctaaagtgctggggttacaggcataagccactgggcccggtctggtcttaaactgttgagctcaagtgatcctcccacctcggcctcccaaagtgccaggattacagatgcgagccactgtgcctggcccagagcctggttttgagggtgtagcaatggccttctggaagatgcaatagctaagtttacggatgtaggagcgagagtcagcatgggcaaaggcagggagggcagagcatccgttcatcccagaaatatttactgagcacccactatgtgccaggcactgttctaggtactggggtcactactgtccaggagacgcgcagacatccccaacctcataaagcttctgctctagtaggaagacgcatggcaaacagaggaacctgaaagttgtttaatgaggagttggggccaggtgtgatggggcacacctgtaatcccagcactttaggaggctaaggtgggaggatcacttgtgaccaggtgtttgaggttgcagtgagctgtgatcacaccactgcactccaacctgagcaagagagcgagaccccatctctaaaaataaataaataatacaaataaataaaagaggagatgaagacacacacataggaaaagaccacgtgaagatacagtaagaaggtggccacctgcaagccaatgagagaggcctcaaaagaaactaatgctttgatttcagacttcaagcctctaggattgtgagaaattaaatttctgttgtttaagccacccagcccaaagcacttcatgacagcagacctagtaaacaaacacacatttctgcagctttggcgctctctctgtggcctgggggtagcaatagctcctctcagctgcagacccaaggattttctgagacagagtcttgctctgtcacccaggctggagtgcagtgacgcaatgtaggctcactgcagcctctgcctcccaggttcaagcaattctcctgcctcagcctcccaagcagctgaatttacaggcacctactaccacacccggcaaatttttgtatttttagtagagacggggttttgccatgttggccagctggcctcaaactcctgacctcaagtgatctgcctgcctcggcctcccaaagtgctgggattacaggcatgagccactgtgcccggcaaccccagggattttcaacatccctttgctccttctattaaccttgcccacatctctgaaaacagtcatttcattccagagaattgtcctctggaatcccttttgaaggaactatgctttttcctgggaccctgccctatacagtgatgccctatacagtagcctgaccgggcagggctactgagagatggactctaagatggactcaagggtaggaaacttccaagggcgtgcatgtgagtttgctcaggctgccttgactgagtatcccaggctgggcagcataagcaacaaaaatgcattgtctcacagttctggaggccggaagtcagaagtcgaggtgtcagcagggttggttccttcaagcctcactacagcctcaacctcttggactcaagggatcctctcagctcagcctcccgagtagctgggactacatgtgcatgccaccatgtcccactaatttttaatttttttttttttacagttggggggtcttgctgtgtggcctaggctggtcttgaactcctgctgtcaagtgatcctcccacctcagcctcccaaagtgctgggacgacaggtgtgagctactgcacccggacctaatctccttttcttatacagacatgagtcatgttggattagggcccattccaaaggcctcattttaatttaatcacctcttaaaaaaaccccacctccaaatacagtcacattcattgtgaggtactgggtgttaagaattaaacatatgggctgggcgtggtggctcacgcctataatcccaacaccgtgggaggaggccgaggcgggtggatggcttgagcccaggcaattacttgagactagcctgggcaacacggcaaaacctcatctctacaaaaaatacaaaaattagccaggtgtggtggctcgcaccactaatctcagctactcgggaggctgaggagggaggatcacctcagcccagggaggtcaaggctgcagtgagctgtgataacgccactgcactccagcctgggcaacagagtgagaccctgtctcaaaaaagaaaaaaaaaaggccaggcgcggtggctcatgcctgtaatcccagctcttagggaggccgaggtgggtggatcgtgaggtcaggagatcgagaccatcctggctaacacagtgaaaccccgtctctactaaaaatacaaaaaattagccaggcaaggtggcgggcgcctgtagtcccagctactcgggaggctgaggcaggagaatggcgtgaacccgggagctgcagcttgcagtgagccaagaccgcaccactgcactccagcctgggcgacagagtgagactccgtctcaaaaaaaagaattaaatacatgaatttttggggggtggaaacacacaattcagcccatagctgtgtgtgagtggggtaggaatgtggtcaggggctgggcggtggctcacactcgtaatcccagcactttgggaggccgaggtgggtggatcacttggcctcaggagtttgagaccagcctgggcaacgtagtgagacgctgtgtctacaaaaaattaaaaaataagctgggcatggtggtgcatgcctatagcctcagcacctcaggaggctgaggtgggaggattgtttgagctcaggagtgagctatgattgtgccactgcattccagcctggggaacagagcaagaccctatctattaaaaaaaataaaaaaaaaagccaggcgcagtggctcacacctgtaatccccccactttgggaggccaaggtgggtggattacatgaggttaggaggtcgagaccagcctggccagcatggtgaaaccccatctctactaaaaaaaaaaaaatacaaaaaaaattagccaggagtggtgacaagtgcctgtagtcccagctacttgggaggctgaggcaggagaatcacttgaatccgggggtggaggttacagtgagccgagatcgcaccactgaactccagcctgggtgacaagagcgagactccatctcaaaaaaaaaaaaaggatgtggccaaggagatcatgaaaggtgaactggccagggcaaaacacaggcaaaaatccaacaaattccaggtaagcatatccaggctgactcagcccatccctctgggtaagcccaagactttcagatgaatcaatctcagaggcagaaaacagctccagcctagaggcaggcacgtcctctgcttggaggggagggggtagtggcggccacctgggtcaccggagacctttgttagcgagaatgggctgcttaaagggaaatcaatcctggctaagcactgagcagctgctcccagtcaaagctgccggagagaggcccgtggccccccagcttctccagggctgggagtggagccagaggaggctgaagactgctctgccaggtggcaggactcagagggccttcaatcagcctgcattgtacccgccagcgcctgtatccatccccggctgagcacgcacttcagtatcacctctagccatggcatgcaccaaagagcagcatccagcaagtgataacatcttcaccagtttagtcaagcattgcccgtgtgccaggcattttgcatgcacgatgtgtgcacgggggacctcatcgcaccacctcctagccatgacctcagacaagtgacttaagcctcatggtgcgccagtttccccatctgtaaaacgaggtgaacagcagcatccccctcttagggcagtcacggaggttgaacgaatgcctgcgcacacagagcttaaaatcacagtagtcttagctgggcatggtgactcacacctataatcccagcactttgggaggccggggtgaaaggatggcttgagcccaggagttcaagaccagcctgggtaacatagtgagacctccgtctctaacaaaaatacatagattagccaggcatggtggtgcgcacctgtagtcccagctacttgggaggctgaaagaggaggatcacctgagcccagggaggttgaggctgcaatgagctgtgatcatgccactgcactccagcctgggtgacagagtgagaccctgtctcaaaaattaaaaaaaaaaaaaaaaaaagcccaggcacagtggctcaggactgtaatcccagcactttgggaggctgaggcaggcggatcacaaggtcaggagttcgaaaccagcctggccaacatggtgaaatcccatctctaccaaaaatatataaaattagccgggtgtggtggcaggtgcctgtagtcccagctactcgggaggctgatgcaggagaatcgcttgaacctgggaggtggaggttgcactgagccgagattgtgccagtgcactccagccccaggtctatgggactgtagagatgctggtgtttctacagctaggactcgccagttctaggcattcttcagagctcacagcaaacaccaccacctccaggaagccttctccatcatctaagataggtctgtgttccttcctgtgcacatctccacagctccctgccccttccctccacaaagttcttatattttattcttttccttgcatggtgggtgtctgcatgccccattaggatgtgagctccaaaagggcagggctgagtctgtcttcttccatgctatggtcccaacaccagcagatgctggagacaatggacaggcatcaagatatgaatgaatgaatgaatgcttcctgtacactccaagttttccatgtgaccccttcctccccgactccccaacaccctctgtctgctctcttcctccttcctctcccatcacagggtggatacaggggctctgggttttgaagcggtcatggagtcaaaggtagttgagtgtagctgtgaagcacatggaccctggaggccgacaacttgaacttcaaaacccggcttctctttctagctgtgtgaccatgggaaagtgacttaacctctctgtgcctcactttccccacctgcaaaatgggagtgatagtagtgccttactgttgagtgagtgattctgacccattcccagactgcaattcccagactgggaggcagagggctgagtctccggcagttaatgaatccggaaaaaatctcagctgtgtcagaggagccccagtgccaagttggcctggttttcatcccaagagagctgagaacatggtctggtgtcagacatccacgctgtgattggcacaaatgcctggtgctcctatgacccccctcgttagggctgggggagtgtgggagatgctcctggggctctgcccagagctgctgactgcctagatgtacccaccctgcagctgctgagcacggcggctcattgctagcagctgtgatcttctctggacctgcccatggcttttgggagccaccacaccttggagatgcttgggaggtgtcacctactcccaggggcagctaatgactgatgcaggggtaaaaagcccactcctcttctcatggtgagataactccacagtgtccccccacccttgtggagcaagccaaaccgggactttacctaggatctcatctttgctcaatctattctcttccaggtcctgctcccctcacccctgccctgactttcaattatgtgctccacagtcaggcacggtggctcatgcctgtaatcccagtactttgggaggccgaggcaggaggatcattgagcccaggagtttaagaccaggctaggcaacacagcaagaccctgtctctacaaaagattaaaaaattaaccaggtgtggtggcgcacacctgtagtcccagctacatgggaggctgaggtgggaggattgctagagcccagaaggttgaggctgcagtgagccatgattgcacccctgcactccagcctgggcaacggagcaagaccctgtctcaaaaaagaaaaaaaaaaagtgctggaaacttacgtctctagttctgcttctcaggaacccaacctaagatgggggaaatgatgaacattcaacctaagagggtttttgtttttgtttttgttttttgagacagagtttcgctcttgttgcccaggctggagtacaatggagtgatcttggctcactgcaacctctgccttccaggttcaagtgattctcctgccccatcctcccgagtagctgggattacaggcacacaccaccatgcccagctaattttttgtatttttagtagaaatggggtttcaccatgttggccaggctggtctcgaactcctgacctcaggtgatctgcccaccttggcctcccaacatgttggtattaccgcactgggccctaagagggtatttatgtcagtgtcccttcaggttcacattcacaccctggcaccgagttctgtcatttccacctaaataggcaatccatcctgcacaaccccgaaagcagccctcacttcgaaatgcatcctcgattctgcccagtctgcctcgtccacatgtgcagcccctgtcatgctccaggaccatccctgatgcatttttccgcaccttacattcatctcgtttctttttctttctttcttttttttaaatctcagctcactgcaacctctgcctcctgggtccaagcgactctcctgcctcagcctcccaagtagctgggattacaggcatgtgccaccacgcctggctaattttgtatttttagtggagacaaggtttcaccatgttggccaggctggtctcaaactcctgacctcaggtgatctgcctgcctcggcctcccagtgttgggattacaggtgtgagccaccgtgcctggcctcatattatttcttgtctgtcgctctcatatgtacactccccaaagggcaggaatttttatcactttgttcattgctgtgtcctcaaaacagaacagtgcctggcacgcagcaggtgttcaataaacatctctggcattcaagaataaatcgtttaagtacattcacttgcaaacagaatccacccaatttttctttttctttcattttttttttagatggagtctcgctcttgttgcccaggctggagtgcagtggtgtgatcttggcttacagcaacctccacctcccgggttaaagcgattctcctgcctcagcctcccgagtagctgggattacaggcacacaccaccacccccagctaatttttgtatttttagtagagatgaggtttctccatgttggccaggctggtctcaaactcctaacctcaagtgatccacttgcctcggcctcccaaagtgttgggattacaggcatgaaccaccgcaccgcccaccctctctttctcttataccaatgcatcagccttacctttagaatctacccattgctctaccctcttgatggccatctccatggtcaagcccctggcattgctcacctgaaccagcagagttcatcccttccatggtctcccagttccccctacttgcccccacagtctgcttcccccacagcagccagagagcacctgtgaacacatgaatcacactgagtctctcccgtgctgagaaccctccatggctcccatctcccctgagttaaaagcccaaatcctcagccaagcgtgattacacctgtaatcccagtattttgaggccagaggatcacttgagcccaggagtttgagaccagcctaggcaacatagtgagaccccatctctacaaaaaattaaaaaataagccggaagtggtggcatgtgtctgtagtcccttctacacaggaggctgaagtgggaggatcgcttgagcctgggaggtcgaggctgtggtgagccatgatctctccttgtctcaaagtagagttctccccaaggcacgtaactccttcacaatctgtcccatcacctccctgccctcacttccttccactctccctctcactcactctgttccagccacactgttcctgcaaaaccccaaacatatttcttctatatcacctctttgcactggctatcccctctgcctgaaatgtccttccacctccttcagacccttactgaaatgtcattgtctcaaaagaccctccctgctggcctggcgcagtggctcatgtctgtaatcccagcactttgggaggctgaggtgggtggatcatttgaggtcgggagttcgagaccagcctggctaacatggtgaaacccccgtctctactaaaaatacaaaaattagccgggtgtggtggtgcgtgcctgtaatcccagctactcgggaggctgaggcaggagaatcgcttgagcctggggggcggaggttgcggtgagctgagatcatgcgactacactccagtctgggcgacagtgagaccttacctcaaaaaaaaaaaacaaaaaacaaaccttccctgatctcccctggccagaactacaagtgccccagcaccccccatccacttccctactccatctgcttccgccacatcatttatgcattaattttgcaaattatctttcttcccctccagaacgtcaggcaggagtttttacctgtttttgttcactgctgtgttgccagcacttaaaatagatcatcttgcacacaacaggcacctggtatccatttgttatttttaaaattctgccgggcacggtggctcacgcctgtaatcccagcactttgggaggccgaggcgggcggatcacaaggtcaggagatcgagaccatcctggctaacacggtgaaaccccgtctctactaaaaatgtaaaaaattagccgggcatggtggcgggtgcctgtagtcccagctacttgggaggctgaggcaggagaatggcttgaagccgggaggcagaggttgcagtgagccaagattgcgccactgcactctagcctgggtgacagagcgagactccgtctcaaaaaaaaaaaaacaattctgcacaacaaccatatgaggtaggaactctcggtgtgccccttatgtgggtgaggaaactgaggcctggagaggggagggggtgtgcttgggtcatgggttagggagtgagctgtggccatgtgtctctccatggtgtgtatgtgtgcaactgtgtgttttttgtattttgttttttgtttttgagataggctcttgctctgttgcccaggctggagtgcagtggcgcgatcacagcacacacagtgtcaatctcccaggctcaagcaatcctcccacctcagcctcccaagtagctgggactacaggtgcatgccaccatgcctagtaaatgtttgtcttcttttgtagagatagggtctcactatgttgcccaggctggtctcaaactcctgggctcaagcaatcctcctgcctcagcctctcaaagtattgggattacagacataagccaccacacccagcccaactgtgtgttttgtgcagatgcagtgtgagtggctgcatcagcccgaatgtggacagaggaggatgcattcaggctcactttgcatcggggtgtctgtgagtggaagggaggcagtgggccagacccaggcaggtgtgaacacgtgtctgtgtgttcggctgggtatgaatgcgtgtgtgtgcgccaatgcactggcggatgggaaattgtgcatccacagtgaagctgtgtgtatgtgtgtgaaggggaggctctgtgagctttggatggggctggagctgcagttgaagcaatgttgtgggtgagggaagaaccccaccagccacaggcctgttatttatagacgaatcctggttcataaattccaatttttttttttttatatctgcctcactgccaggcccctataaatattcatgagtttcctgccttggaatatttgagtagtcagaaggaggagccgggaggagaggggacaacgaagggtccccagtggcgctgggagctcacacgggtcgggaggacaggggtctctctggttttgccttctcttccctctgggctcccctcttccaagctgcagctggcaagacggggaaggcgctgggctggtggagacatctaccagcacctattattcttcttccccagtgtctgtggaaaaataccacccactccgggggcagagaaggtgtctgcactgttttctcagctccagctctagctgcagctcagaaactcattacccctgggacccccagctcaacagagacagggagatccccctgatgtatctgaagctaagggaagactctggggggagggggcgggcactgtggcctcctgccctgcctcaaggaaggaaacaggtcatgagaatgggtgcccgtgagaaggaataaagtgcgtgcatgtggacgtgtctacaggagtgagtaactgttggaacatgtaagagactgcagtagtcaacagaactgttgacacattttctagttcttttctcttaggcacatgatggggctgtaggacttccccagtgtggccacgtgacttcctttagccaatgccttttaaacggcagtgacttccaggtgaatactttaagagccggtgtggaccaggtgtggtggctcacacctgtaatcccagcactttgggaggccaaggcaggagaactgcttgaggccaggagtttgagaacagcctgggcaacatagcaagacccctattctacaaaatattttaaaaatttatcgggcatggaggtgcacacttatattcccagctactcaggaggctgaggcaggaggattgtttaagcccaggagttggaggctgcagtgagctgtgatcacaccactgcactccagcctgggcacagagcaaaaccctgtctctgaaacaacgaagaaaaaaagaggcaagccagtgtgcagtgccacagtcttccctcagcaaccgcagaagggcatgttgggctgggtgcagtggctcacacttgtaatcccagcactttggtaggctgaggcacgcagatcacctgaggtcaggagttcaagaccagcctggtcaacatggtgaaacccagtctctactaaaaatacaaaaattagccaggcctggtggtgggtgcctgtaatcccagctacttaggaggctgaggcaggagaatcacttgaacctggaggcagaggttgcagtgagccgagatcgtgccactgcactacagcctgggcaacagagcgagactccatctcggaaaaaaaaaaaaaaaaagtgcatgctggggccaggcacagtggctcacatctgtaatcccagcactttgggaggccgaggtaggtgaatcacttgaggtcaggagttcgagaccagcctggccaacatggtgaaatcctgtctctactaaaaatataaaaattagccaggtgtgctggcacgtgcctgtagtcccagctacttgggaggctgaggcaggagaattgcttgaaccgggaggcagaggtgagctgagatggcaccactgcactccagcctggcaacagagcaagactccatctcaaaaaaaaaaaaaaaagtgcatgttggtatgaagcctccatcactggggtccctgagtggccagactaggcagagaccctgccaaccctcatgtatcatgagcaaaagctcatttggttgtactaaccctctgagacttgggggctgttttgttatacagcaaaacctagcctatgctgactggcacagagccagtgagtgtgtgagactgaggtgtggcacgtctgtgtctacatgatcaagaacacacatgagcaggtagctatatataggtttatgtgtgtgagcatcagcaagtgtataaaactatgcatatgaatgtataaaacaggatggtgtcagatgatagataagtgagaaaactccagggacactgttctccgagaacaccatgaccctggagtcgggcactattgcagatgtgaaactggcatagtgaggagggctatgtctgagtgtgccagttggctgtgtttgtaagactgtgatgtggtctgtacgtgtgtgtgccagggtttggggtgtcaatgtgcatgtctgtgccacgtgttgctgtgtatctgaggcacgtgcatgggttggtgtgactgtgtgtgtgcatgtgtgtatctgctgctgtgtggatatgtgataccctgggtgtgacagcctatatggagtgggggcatcactcaagtctgtatcagagtacatacagccaacaccacagggagggacagccaccctgggcatccctagtgctgttggctcatgggcctgacctggctcaaccttggatcctaggatgacctggcattgggaaataaaattctggctgtgtgcggtgcctcacgcctgtaatcccagcactttgggaggccaaggtgggtggatcacttgaggccaggagttcgagaccagcctggccaacatggcaaaaccctgtctctactaaaaatacgaaaattagctaggcttggtggcgggtgcctgtagttccagctactcaggaggctgaggtgggagaatcacttgagcccaggaggcagatgacgccactgcactccagcctgggtgacagagcaagactctgtgtcaaatcaaatcaaataaaaataaaattctcatcccctcatgagtcctgggacattccaagtcatctgcaatggccattcatcccagaggcactcgacagtttgggtgacgcggctcaacaagtagggagagcaaacctgttctcccacaacttctctaagataagcccattttctggttctctcctcacaaggttctggtctgatctgtctcaggatgtgggttcagccctggtccatctcaggattcaagttaaactctggtctatctcagtacttgggtttggccttgtctatctcaagtccacagcgtagccctgatctacccaggactcggatttggtcctggccctcttcatctcttagaaccaggtttctctttggtctctcccagttaagcctttgtctgtccaaggcttgggcttgactctagtctgtcatagagtcaaaccacaaggcatcttttattttttttctttttctttttttttttgagacagagtctcgctctgttgcccaggctggagtgcaatggcacaatttcagctcactgcagcctccacctcccaggttcaagtgattctcccgcctcagcctcccaagtagctgggattacaggcgcctaccaccatgcccagctaatttttgtatttttagtagagactgggtttcaccatgttagccagggtggtctcgaactcccaacctcaggtgatccacccgcctccacctcccaaagtgctgggattacaggcgtgagccaccgcacccggccaatcatggagcatcttaacaccttggggatgtatctgtgttctgttccaggacttgagtgaaccccccgtcttggaacctgagctgagcctggtctatctcagtacctgggtacaccctgccctagtagaacgttcacaatcaggtgaggatttcatggcagaaatttccccttcctgggcaccttctcacgtgtggagcacttctcttaaagtgtttggggcctcttgggtgaacgtctactgcaaatgattgctgtgtctcaggattaatgagggtaaggggatttcatttctccaacgccatcatgtaaaattcattaaagcagagttcgcaggtctatttcaaggattattaccagggtttcttgatgagctattacacacagcataaatcttcaagaggtttcaagacgttacaagaaccatcctgagtctcacctcatagatactagagttgaacatccctctatctgagctctccccagcctcagacaccaaacctcaggtcaggagttcaggagagagcattcaagagggttttcttggtcgggcatggtggctcactcctgtaatcccagcaactttgggaggccaaggcggatggatcacttgaggccaggagttcgagaccagcctggccaacatggtgaaaccccatatctactaaaaatacaaaaattagccggccgtggtggcgcacgcctgtaatcccagctactcaggaggctgaggcaggagaaccacttgaacccgggaaggggaggttgcagtgagcagagatcatggtaacatgtgctaaacaggaagggtcaaaacctgctgtcacctgagcccaggtaagtcacggctgcagtgaaaccgggatggtgtcactgcactccagcctgggcaacagagtgagactctctctcaataataataataataataataataataataataataaataaataaaataaagccaggtgcagtggctcacgcctgtaatcccagcactttgggaggctgaggcgggcagatcacctgaagtcaggagttcgagaccaccctgaccaacacggagaaaccccgtctctactaaaaatacaaaattagccaggtgtggtggtgcctgcttgtaatcccagctactcgggaggctgagccacgagaatggcttgaacccaggaggcagaggttgcagtgagccgagattgcaccattgcactccagcctgggcaacaagagcaaaactccgtctcaaaagaataaaaaattaaaaaaatacataaataaaataacttcccactcctcggttgagaaccacagctctagacttagccttgcattttctctttatctttctctaaggagtctgacccttaccaaagcgtccatcaacacctgcctgtatatatgtcctcagagctccaatgcatatattcatcatctgactccttgaccgctccccctgccccagatatctctaaggcatctcaagcccaacatgctcaaactgaagtgcacagccttccctccctaacctagttcttatccaacattccttatgtcaccatctccatcctccccacccccgggccagtgggtcagacacccgggcattatcctcaccctcattttactccctcaccaaatcctactgatgttaactcctagatagctttagaattcatgcatcattcttcatctctatcaccatgcaatggtccaagccactttcacaattcagcaagtctaggctgtgtgcagtggcttatgcctgttatcccagcactttgggaggccgaggtgggaggactgcttgatcctaggagtttgagaccagcctgggcaacatactaggaccctaactgtaccaaaaaaaaaatttttttttaattagcggggtgtggtggcacacgcctgtagtcccagctactcgggaagctgaggtgggggatcacttgagcctgagaagtcaaggcttcagtgagccgtgatcacaccactacactccagcctgggtgacagagtgagaccctgtctcaaataaataaataaataaataaatgtaaaatatgacaaaacatttaaataaaaataaagtctattcggtctacctcaatctaccttttttcttgctagtaactctacacatgggagcttctgggaaactttatttatttttattatttatttatatttttagaccgagtctcgctctgtcgtccaggctggagtgcagtggtgccatctcagctcactgcaacctccacctccagggttcaagtgattctcctgccccagcctactgagtagctgggattacaggcccacgccaccacacctggctaatttttgtatttttagtagagacagggtttcaccatgttggccaggctggtctcaaactcctgacctcaagtgattcacccgccttggcctctgaaagctgggaaactttacaacgcacgtgtgatcatattatcctcccggccaaaaccatattggtggattccttttattcttaggatagagataaaactccttaatgtcgccacaagagcctgtggctctgcactttacttacttctctgctttcatctggtctcctcgttcccaggccttctttactttattttaatttttttttttttttttttttttgagacggagtcttgctctgttgcccaggctggatggagtgcagtggcgcgatcttggctcactgcaagctccgcgtcccgggttcatgccattctcctgcctcagcctcccgagtagctgggactacaggcgcccgccaccacgcccgactaatttttgtatttttagtagagacagggtttcactgtgttagccaggatggtctcaatctcctcaccttgtgatccgcccgcctcagcctcccaaagtgctgggattacaggcgtgagccacagcgcccagcctattttaattttttttagagacagagtcttgctctgttacccaggctggagtgcagtggcacaagtgtagcttactgcagcctggaactcctggctcaagccatcctcccaccccggcctccgaaagtgctgggattataggtgtgagccaccacctcacctggccttgcaaggccttctttagtccatcatattttccatccttcctcttaccccagggcctttgcataagcaattccctctgcgcagagcatcctttcctctctgcatcagatctcagctcttgcttcctctgacttccaaattacatcaaatctccttattagaagctactagagcaccaagaatctttccctcaaagctgttaatcacagctgccaattatatttatttgcaactacataatcatcacctacctccctgttttgcagaaagcgccacacatccatgtctgtttggttgaatataatttctcccttaaaagcatataagaagtcctcaaaaacacttgttgagggtgcagtggctcacacctataatcctagcagtttgaaaggctgagacgggtggatcgcttgagcccaggagttcaagaccagcccgggcaacatagcgagaccctgtctctacaaaaaattagaggatgtgggccagatgtggtggctcacacctgtaatcccagcactttgggaggccaaggtgggcagatcacctgaggtcaggagttcaagaccagcctggccaaaatggtgaaaccccatctctactaaaaatacaaaaattaggcaggcatggtggtgcatgcctgtaatcccagctacttgggaggctgaggcaggagaatcacttgaacccagaggtggaggttgcagtgagccaagatcccaccactacactctagcctgggcaacagagtgagacttcgtctcaaaaaaaaaaaaaaaaaaaaattagaaggcatggtggtgtgagcctgtagtcccagctactcaggaggctgaggtgggaggattgcctgagcctagggaggttgaggctgccgtgagctgggatcgcgccactgcactccagcctggacgacagaatgagactctgtctcaaaaataaaataaaataaaaacaaaatacttgttgaataaataaatacacgaatggataaatggctccgctgttttcaggatctagtctgagtgacttggcctggcatttgaggctctccatgacctcaggggctgagctccctcccggtctcagtaaaggtcagagcaaaaacccaagggcatgagatgccaggtggggaataataattcagcagaagcaagaagtcagaagcacagtgaccaagacaattcaggctcctccacagagtcacaaaaatcttgggggacacactggctttcttcccatggagcatggaagggggttcggatcattgttacttcctggctattaacatgcagagtgacctgtctgatgtctgttctgccttgattctccttgtcttttattttatttttacttttagacagggtctcgctctgtcacccaggctggagcacagtggcgtgatcatagctcactgcaacctcgacctcctgggctcaagcaatcctcccacacctcagccttccaagtagctgggactatagatgcatgctactgtgcccagctaatttttttttttttttttgagacagacacgggatttcaccatgttggtcagggtggtctcgaactcctgacctcaggtgatacacccacctcggcctcccaaagtgctgggattacaggcatgagccatagcgcctggccccagctaatttttttaaaaaaattttttgtgctgggagtgttggctcatgcctgtaatctcagtactttgggaggccaaggcaggcagatcacctgaggtcaggagttcgagaccagcctggccaacatgatgaaacctcttctctactaaaaatgcaaatattagctgggtgtggtggcgggcgcctgtaatcccagctacttaggaggctgaggcaggagaattgcttgaacccgggaggtggaggttgcagtgaacagagattgtgccattgcactccagcctgagcaacaatgagactccgtctcaaaaaaaaaaaaaatttttttgtgtgtggagactgggtcttgctatgttgcccagggtggtctcaaattcctgggctcatgcgatcctcctgcctcaacctcccaaagttctggaattacaggcatgagccactgtgcttggccccctccttatctttaagaaattctccctgggccttataagtctctccagccaccacgccatttctgtgttcctctcttcccccaattcatcacatctgatccatcagcaagtgctgacggctctgcttctgagatgtaccagtctgcccactgctcaccattccagctaccactgttctggttcagataacaccgggcttgctcggtccttctgattctactctcacttccgggaatccattacccaacccagcagctagagagatctttaaataatgtgaatcagatcaagtccctccaccccacggcaaatcgtccagcagcttctcactgcgtttggaataaaagccaacaactttgggaggccgaggtaggtggatcacttgaggtcaggagttcgagaccagcccagccaacatggcaaaaccccatctctactaaaaatacaaaaattagacaggcgtggtggcagccacctgtaatcccagctacttgggaggctgaggcaggagaatcacttgaacccgggaggtggaggctgcagcgagccaagtttgcaccactgcactccagcctgggcaacagaatgagattccatctcaattaaaaaaaaaaaaagaataaaagccaacagttcactgtggccagaagcctcgaatgcagtgttccctgccaacctctacaactccattctctctccctctccagccttctctttccagagtgcactatgcttgtttcaacctcagggcctctgcacatgcagctccctctctcatgatgcccgtctccctggctccttctcaatcagctccccaaagagcttaccccagtgacccaacataatggggctcacccactcatactctctcccatctacttgttttgttcttctcttttcttttttgagacagagtcttgctctgtcacccagactggagtacagtggtgtaaccatggctcactgcagcctcgacctctgggccccagtgatcctcccatttcagcctcccaagtagctgggactacaggtgcacgccaccatgcctggccaatttctgtatttttttttagagatagggtttcactatgttgcccagtctggtcttgaactcctgggaccaagcaatcctcccacctcagcctcccaaagtgctgggattacatatatatgtgagccaccacacccgccccacccccgccggatactgtttagccctctgtactgcgcttatggccagatgataatttcttgtttatttgtttgttattgatctcctcccaccacaatgtcagttccacaagagcaagtgccttgtctcacgtgtccccctggcacatagtaggtgcataataaatatctgttgaccgaattgacaaatgagcgaatcatggctttctaggtccctggagccccagctattgggttttgtgagatcccctgcattccttacataaagctcctacttccctgggccggttaggaggctttcaattccaaacagactctctgactcccacccaccccatggccaacaggaggcaaatgaaaatgaagagaggtgtcagggaagagctaactgccgagagaggaaacctgggaaggggaggagagggatgacttgaaaagatggaccttctccagctggagcagggaaggagagaaactgacggagctgcatcagtggatgatggaggcacaccacggtggacacaagcacacgcaggaggtgtgagaaaaggctggaaaatgagacagaaaagggccgggatctctctgcaccacactggtggagaatattcatgatagtaatcatgattcgactcaataaaaaccacggtctctaccacgcactgcacccttccttgtgccgggcacctttctttgcattgccccccatacttagctctgatgggggaaaggtgtgaaacgtgatgggggtggggagagaaatcccagctaaaaaaggctggtgaagcgcttcgggtggctgaggcaggagggtcgcttgaacctaggagtttgagacccgctcggacaacattgtaaaaccctgtctctacaaaaaaattaaagattagctgagcatggtgatgcatgcctgtagtcccaactactcagcaggctgagttgggaggatgacttgagcccaggaggttgaggctgcagtgagctatgattgcagcactgcactccagcctgagtgacagagcaagaccttgtttcaagagaggagaggggagggaaggggagggaaagggaaagggaaggggagggaaggggaaggaaggaaggaaggaaggaaggaaggaaggaaggaaggaagggagggaggggggagggagggaaggaggaagggagggaaggaagcggggagggagggaagggagggagggagggaagggagggaaagaaagagagtgaggaaggaaggaaggaaaaaggaaggaaggaaagaaagaaaaaggaaggaaagaaagaaggaaagaaaaagaaagaaaggaaggaaggaaaagaaagaaggaaagaaggaaagaggacggaaagaaagaaaggagaaaaaaaaaaaaggaaggaaagaagaaagaaagggagggagggagggaaggaaggaagctggatacagtggcctgtgcctgtaattccaactacttgggaggctgaggaattagacttgcttgagcctggaaggcagaggttgcagtgagctgagatcgcgtcactgcactccagcctgggcgacagagtgagactctgtctcaaaaacaaacaaacaaacaaacaaacaaacaaaaaacataatgaaagaaaggttggtgtggtgagcagggctgtgctcagggctctgtattcctggctcactatccaggatggccgagaactcagacacccacctgactctgaacttccctctgtactcctttgaaaagagcctgagggcacttttgaggccacctttgttggctttgagatctcgctttgccaggagttcagagaatttctggagatttggttatttgtgttccaaaagagcagcatgtaggcattggagtgcacagggattctgcaaccagatgtggacgcctgtgttgtttatccacaggcacctgtgaattcccacgtttagggcacatgtggagtatctggacatgcctgtaactagctatgcacatatgtgcacatcagtggaaatccagggaaacgccattgtgcattagaggatatgtatgtctgtgtgctgttgccaatggcaataaacattccttttgttcacacatgttcacaaacattctatttccatagattctgtgtacaattcgtgagcccacaagtcaacctgcgtaatcactttatatactgactatatatatatatatatttcgagatggagtctcgctttgtcacccaggctggagtgcagtggcgtgatctcggctcactgcaagctctgcctcctaggttcactccactctcctgcctcagcctcccgagtagctgggactacaggcacccgccaccaagcctggctaattttttgtatttttagtagaggcggggtttcaccgtgttaaccaggagggtctcgatctcctgacctcgtgattcgcccacctcagcctcccaaaatgctgggattacaggcgtgagccactgcgcccagccgactctatattgatattgaggacactggatatatctgtgtttacttgccttcatcttttttttttttttttttgagatggagtctcactcagtcgcccaggctggagtgcaatggcgtgatctcggctcactgcaacctctgccttctgggttcaagcgattctcctgcctcagcttcccgagtagctaggattacaggaacccaccactgtgcctggctaatttttatattttgtatttagtagagatgggttttcaccatgttggccaggctggtcttgaactccactcaagtgatccacctgccttggcctcccaaagtgctgggattacaggtgagagcccaggagttcaagaccaggtgggaggatcacccagccttttctggtttctttttagagacaaggtctcactgtgtcacctaggctggagtgctggtgcgatcatagctcactggagcctcgacttcctgagtagctgggattaaaggcatgcaccaccatgcctggctaattttttatactttttgctgtagagacaggatctccctatgttgcccagactggtcttgaactcctgagctcaagtgatcctcctgccttggcctcccaagtagctgggaccacgggcgggtaccaccacgcccagctaatttttgtactttttgtacagacagcctcgatttcctgaatagctgggattacaggcatgcaccaccatgcctggctgatttttacatattttgttgtagagacaggatctcacaatgttgcccaggttggtcttgaactcctgggttcaagtgatcctcccactttggcctctcaaagcgctgagataataggtataagccactgcacctggccattgcttttatcctggataattctgcagccatggacagaagtgcacatacccatactcacaaatagctctgccacatgtgccagcatgagagcccatcacacaggtgaacgcctccctgtgaacacccatggccctctgtgtgctctcctgaacagccaggtacccacatgtatgctcaccaggagccaaaaacatgttattcactaacatgttaatcacacagaagccacacacttgcatccattcaagtaacaactgtgcccttccatgattaactctccacacccatttgttcagccgcctgtatccacaaacattcctacgctcctttcaggaggaactggcatctgtatatatctgtcagctgccatcttaggtctccccaacgaactcattagcattgcggtgaaacctgaaatattcctgcagaacttctgctctactaataagcctgatgtcctgctgaggtcacatggcacttacgagggctaatggagccagccttggccagcaaggtaggaaaccctggactcctggaatagccagagaatgtctggctatttactcccaagaataaacaaatttcctttccttctcactgcaccaagtgccccagccagcatctatctgcagaaccaaagtcatatttaagatacatttttggcctcaatactatcctggcatcacactaaaggctacatctacttgttattctactgaaggttgcattactctgatgggcactacactgggagctgcatcaccagatttgtcattatactgaaggccacatcactatcatgggcactacactgagggctgcatcaccagacttgtcattatactgaaggctgcattacctggttgggcattacactgagggttgcatcatcagacctgtctgaaccaccctgttagtcttgcccttaaggcctccaatcccaggctgagtattgtttgtgtgtgtgtgtgtgtgtgtgtgtgtgtgtgtgtgtgtgtgtgtgtgtgtgttttgagatggagtctcactctgtcgcccaggctggagtgcaggggcaggatctcggctctatgcaacctccgcctcccaggttcaagcgattctcctgcctcagcctcccacgtagctgggattataggcatgtaccaccacgcccagctaatttttgtatttttagtagagacagggtttcaccatgttggccaggctagtctcgaacctctgacctcaggtgatccacccacgtctgcctcccaaagtgttgggattataggcgtaagccaccatgcccagcccagtctgagtattatactgagggcttcataactagaaagctaaacttaacaggcaacactttccctcagcactggtagctcccctgtgtgtagtgtgaaggggcaagcagaagtggggttgagaagtgactctgaggggcctggtaggactagagagatgaggaaaactggggactctgaagccacacactgggggtgggaagccagaggacagaaaagcaactattatatcaagagttggaattctggccaggcatggtggctcatgcctgtaatcccaacactccgggaggccaaggtgggaggatcacttgaggacaggagtttgagaccagcctgggccacatagtgagctccatctctatgcaaaatttaaaaattagccaggtgtggtggtgcacacctgtagtcccagctatttgggaggctcaggcaggaggatcacttgaacacaggacgtcgaggctgcagtgagctatgatcatgccattgcactacagtctgggtgacagagtgagaccctgtcttgggaggaaaaaaaaaagttgaggccaggcacagtagctcatggctgtaatcccagcactttgggaggccaaggcgggtggactgcctgagctcaggagttcaagaccagcttggccaatatgttgaaaccctgtctctactaaaaatacaaaaaaaagaccgggtgcggtggctcacacctgtaatcccagcactttgggaggccgaggcgggcagatcatgaggtcaggagattgagaccatcatggctaacacggtgaaaccccgtctctacgaaaaatacaaaaaattagccgggcgtagtggtgggcgcctgtggtcccagctactcgggaggctgaggcaggagaatggcttgaacccggaaggcggagcttgcagtgagccgagattgcgccactgcattccagcctgggcaacagagcgagactccatctcaaaataaaataaaataaaataaaatacaaaaaaaattatccaggcatggtggcaggtgcctgtagttccagttactcaggaggctgaggcaggagaatcactggaacccgggaggtggaggttgcgccactgcactccagcatgggcgacagaatgagactccatctcaaaaaaaaaaaaaaaaaagttggaactcaaccttcttgagccactagtgctgaaggggccggaaagattcagattggctcctcttggaagctgtggatccttgtcctgtctctgctgttcttaccaggagcccctgccaaaaacctaccttgccatgcccttgagaagaaaagctttacctgcaagtacaggccttggcagcctggcacaggcgctataccctgagcagccccaacatgtgccatatcctcatatgtgctccacaagccccatcgcacctcaacagtcaggcatggctttgccacgctcagacattccgcacacaagacacgctctcattcactccaacacgtcccttgggttcagacacaactgatggccatcagattccccttacacgatggggcgtgcttgccatgaagacacgctcaaacatgctatgacacgctctgacacacaggggcacacacacacccaagcatgctttcacggggaccaggtaggtctccaacctctgccacagtctacacgcccatggccaccttgcccttccagatggattgatggggcggcggggagaaggctgttataaattaaacatcgagacactgtctgagcaccaggctctgccatccactcattggctggttccctcccaggaggctgcgggcacacagggtgggggagagggcaggggaagtggctcgcttaattaattagtcctcattgagatatctttgcaaatatccctttatcgaaggacaccattccatccgtttcctgggaatttgttgcctctatgtgtctctggcccctgagtatcgcagaaatgacaagacaagaaagagcgcgcccaagagctgctcaaaccttagctgtgtttctgatcacgacagcagcactgagggacaagcgggaaggctcagagattcagagatccaggcggaggggcagagagattaggcaaggggagatgcggaaactcaaatacaaaccgaactgcagagtcagagatacggactctgaaatgcaggaagagagagacgcaggcagagaaactttgcaactgggaggaccagagtggggacagatggacgtgcggctgggcagacaaacctcccctctgccttttcccgcctggcttggccttccccatctcctgggcaatccactctctgcagcggcaggcagcagtaacaatcaggcctgattccttttggccctagctaccctccccttccctctccctcccccaatcactcttgcaatcatctcccttgttcaaaatgagcttctgcagctgcagcccagacagctgttccatcttggagccagtactgggcctggtggctgggtcctagagggacgccctcctgagtggcagccggggagggggaatggtgctcgggggcagagggggcaaggggtcacccggagcttgggagcccacctccatctccagtcaacacttggccccatcaccagcatacccagggggtccagacactgccaatgcctctctttggggccctcaagagaggtggtctggggccgggcgtggtggttcacgcctgtaatcccagcactttgggtagctgaggcgggtggatcacttgaggtcaggatttgagaccagcctggctaacatgctgaaaccccatctctactaaaaatacaaaaattagctaggcagggtggcgcacacctgtagtcccagctacttgggaggccgaggcaggagaatcgcttgaacccgggaggtgattgagggagatcgcagtgggccaagacggtgccactgcactccagcctgggtgagagcgagattctatctcaaaataaatgaataaacaaacaaacaaataaataaataagagaggtggtcttggtcatcctgccctctgtcaccaaatccttcctaacatccaacacaggtcctggccctagaagcctctgccgtccaagaattctagtctgtttcccagggtccccgtcagggtcctatggtgagatggagatagaatcccagaggtagagacagacagacacagagagacatggagagacagacatgaatgagataaagagacagatataggccgggcatggtggcttatgcctgtaatcccaacactttgggaggccgaggtgagtggatcacttgaggtcgggagttggagaccagcctggccaacatagcaaaaccccatctctactgaaaatacaaaaaattagccaggcctggtggtgcatgcctgtaatcctagctacttgggaggctgaggcaggagaatcgcttgaatccgggaggcagaggttgcagtaagcaaagatcgtgccactgcactccagcttgggcaacagggtgagacttgatctcaaaaaaaaataaaataaaatttaaaaattttaaaaatctaaagtccctgaaagatccccctccccacgacatgatatggctcccatcaccttccttccctcacctcctctccctcttccgctcgctcactatgctccagacatgggcctcctccctgttcctccaacatgccaggcgtggtgcgatcatagctcactgtagcctccaactcctgggctcaagcaatcctcatgctttagcctcctgagtagctgggactacaggtgtgcaccaccatgcccagctaattctttttatttttcctctttttcttttttttgagatggagttttgctcttgtcacccaggctggagtgcaatggcgcgatctcggctcactgcaacctctgcctcctgggttctcctgcctcagcctcctaagtagctgggattacaggtgcctgccatcacacctggctaatttttttttttttttttttttttttttttttgagacagagtcttgctctgtcacccaggctggaagtgcagtgatgcaatctcggctcactgcgagctccacctcctgggttcacgccattctcctgcctcagcttcccgagtagctgggactgcaggcacccgccaccgtgcccagctaattattgtatttttagtagagacggggtttcaccatgttagccaggatggtctcgatctcctgacctcgtgatctgcccgcatcagcctcccaaagcactgggattacaggtgtgagccaccgggtttcaccatgttggccaggctggtcttgaactcctgacctcaggtgatccacctgccttggcctcccaaagtgctgggattacaggtgtgagccaccgtgcctggctaaaaatgtattttcttttggggttttgctatgttgtccaggctggtctcgaactcctggcctcaagcaatcttcccaccttgacccctcaaagtgctgagattacacatgtgagcccactgtggtcagcctattttaattttttgtagagacaggatcttgctatgtcgcccaggctggtcttgaactcttggcctcaagcaatcttcccacccctgccttccaaagcttgagaattataggcatgagccacagtgccactctaagagccttttgctgagaactgctcagctcctccttattcgtcccataaagcaaaaggtccccctcaaatagcacacccctcctccatctccccttccctctctccagccccccaggcagaggcgacggtcaagggtataacatacaagattcaggtattttacttcaggcctcgaaatgatgtccgtggctggcaatacagctgacagctcttagtctggtcctggatttatgatccccaggtgagaagccattccgctgaaggctcctgtcccacagggatggtttatggctgggagttggccaaaggtagtagcggcagcttcctccccacgtcttcccagagatggtctataaccacaggaatgctaagctgcttctgcaattcaggaggaggaagccagagagaagcaggacccccaaggctctacgctcaccgccccacaccactgagttcctttttaaagccaaacaccagcatccaaccttccgcctcctgactttgggaatccatactgctttgtttcctgaacccctcagcctccccgacgttggggtgctaaaccttccgacatctcctcctaaccgaacacctactgtgtgcctggtcactttccatttgttctccccagtcctgaggaaggtgaaatggatttagacacttgagaaatgtttattccaggcttggctagaggggtaaataaaacaacccctccttactaaacactactatgtgcccgttatttatttgtttttgtttgaaggaggaatccacaaatccttatgaaggtgtgattgtggattcagtcattggacaaatatttattgtaggcctatgtgcgccacaccttagggttcagtagtgagcaaaacacagatgtcttcaaggatcttaccatctcataaagactctaaattccccctgactaataaggaaatcgaatcccagcttcttaggaggctaagacaggagaatgacttgagcctaggagttccagatgttagtgagctatgatggcatcactacactccagcctgggtgacagagtgagactctttctctaaaaataataatattaataataataacaataaggaagttggggcttagagaaattaaataatttcccccaaagtcacacagctagtaaattacagggccagaattcaaacccagatatgtttgactcaaaaatcttatcactaactgagcatctgctatcttaggcactgagctgggggttttcaaacataaaaattcttgacatagaagaggcacttgatagtcttgtggaataggccaggcactggtggctcatgcctgtaatcccagcattttgggaggccgaggagggaggatcccttgagcccaggagttcaagaccagcttgggcaacatggtgagactccacctcttaaaaaaatagttttgtggaataaatacaatggatggaaggatagatgaatggatggagaggcagatggatggtggaaggatggatgcacagaggatagaaaaagagagttggataatggataatgcatgcatggaggaattggtgaatgcatggatagagatggatggatagaagaatggatccatgaaagaacagagagacaaatgatgcatcatggatagatgaaaagagatgggtggaaggataaagagatggatgtgtgaaaggatggatgtacagatggatggacagatggaatagtgggtgggtgtatgagtgaatggatggagagaaaatggatgggtagatgaaataattgatggatagatggacagactgatggaataacaggtggttggatgaatgaatgaatggagatatggatagcaagacagatggaaggatgggcgtaaaaacagatggatagatgaaataatagatggagggaaggatggatggatggatgaagagatatatggaagcgtggaaggatgggaatttgaacagcagatctctgttacccacaacaattctgtgaggtaagacatcattcccattttatagatgagaaaacaatagctcagagtgacaaaggcactggccagagtcatagagcaagttggggacaaaatctagattccaacataggtctttcagactcccaaaatggacaccctcatgtcacagtcccctcccagccctcaccctgagtaccttaacatctcacttctcagatcccttttgacaaagtataatgagactgagggatggggtggtgtcagggatgggagggccattggctttcagcaggtgaattcatggaagcattggatgaagatgctgttagctacgaatgggccagagtggagatcaggtctgtttgggcacacacacatacacacttacagaaaacacacagcacacagggcatcctacccacatgcacacaaggcaggcacacacacacactttcataaatacacacttgcagttatatgcacacacttacaaagacatacctgtccacacatatgcacacaaagatacttgcacacacgtttgcacagatacatatgcacacacaaaatcataactcatagacatgctcttatatacttatttatacattctgcagacacaccatatgcacacatttacacacacctgcatagaacacatgtacacagactcacttgctttcaatggtggtagagggaaatttggcttctgatttcaatgagataccatctctctcccttctcagatggcaacggcaagaagcctgtatcatacttgtgtataacaaactcatatgcacacatgcaatcttgtaacacaggcaaacccatagtcagggacaggcaattgcagatacacatgctgatacgtccacacccaagcacagtcactcagggacacacccacactcattctgggatgcaccctcacacacaggaaggcacatcggaccccatgccggcagtgcacataaactttctccactcccattcccccatatacacaccgaaacacacacatatagacacaccaggacatacccaaataataaacacttaatgtgacagacacacagaaacacaccgtctcacacattggctgccaagtctaagaatctagcctgaaagctctcacctgtgtcaagcccaataccacccccaccaggggctggacaaagccttctcaggtgtccccaccaccaccacacacccttgccttcgaccctagggagcaaattcttctttgctcccatcaaggagaaagaagctgcgggatgaccatttggggctaagcaagggagggttggtgaagttggggctaaagaaagggagccccaggcatcgcagcctgggtttgggggatgatttgggaggagccccccaaacagatggaacaggggtggggctaccagaggttgaggagtggggggaaaggcatatctggaggaggcccagggaagtttgcagtgaaggaaacccctcccctctctcctcaggacaccacggggagaaccccactgagttctctccttcttccctgatccagggaagctctgtagtggggaagctggaggataaagcctcaaagggggatgggatgggaaggcgccatcctggagcttctggaggcagtgtcagctccggccccagtctgcgccccgtctacctcccagggagggtgagttatggggataaatattcagcacatggcgaggcaagaatggcggaaggggtgcaggggagagaaaaagagagaaaaaaagagatacaaattctcagcgccacagagacagagacaaggaaagatagaaatattaatagaaagagacccagagacgcaaagcaggggaaatgaatagagactcagacagaactactcagagacgccgagacgcaaccaggcagagaccttgaaggtggagacactcggaaacccctcgatcctcccctctttcagagacagggtccttctaaacccccgagtctcaccctcctcccgctgcaccccactcagcccggactcagctcaattctgcagcccttgtcgcctccgccctggggccggagcgagcctggtacgctattcgcgctcagacattgctcactaataatcataataatcaataataacagcaagaaccatcctaaatggcgcggaggtggctaggggtcccggggctccttctgcctccacgtccgaccctggaaccccgagagggcgtcccctacccaggcgtgccgggcagggtcgtgggaagcacaggggtagagggggacaggtgggggccccgggggctgcggcggcggcagcggctgtggcgcgggtaccacgccccccgggagcgccccccgcgcggcggccactcacgattttctcagaggcgcccgcacgggacacggtgccgttgagccccacgagcgagggcagcgtctgcgacatccagttggtgaccatggccatggtgctcagcacggccccgatcttgagcagcggcaccgacatcgcgcctccgcctcatgccccgcggccgcccgccgcgcgtcccttctctggcccgccgcggggcgctcggtccctcgacacccaggcgccccgggggggcgtgggggagggggcacgagcgcgagctgcggggcagggggtccgggacggggtgagggggggctcggggacgcgggctgcggctcggcgcgcctggcgggctcctcttataaagcgccggctcgggcccccgccccctcccgcgcctccgcgccgggcacttccagccgccgtgacgtcacgcctccggcccggagcccggcggggggcggggggcgcccagactgcccccaccccccaccccacgccctcgcccgccccccgccgaggacctctccatggggtgggggacctccccctggtggcattccccaagcgccccaccaccaccgcggtggcattccccagccccgccccccaacggtattcccggcccccctccccctaggcggtgttcccggaccgcctcccgcacgcagaccctcttcgagcctgagccgcgggaccccgcgcgtaaaggcgccctcggcccaccccggccacccaaagacggcagggggccggagtcgcaaatccccacccacccactgttgggacacccaccctggctacctaaaacctcggacagcgggcattggggggcgtgggggggcgacacgctcgtgcgctcccatgaatcgggtcaccaagggtctcctttagctgggggaaggggcttccttcccgggcactgagaccactctaaggatccttcggtcatttcgtgcccccagggtggcgtgatccagggccagcagacgaaattgtttgggtgcaggtgcggtcctggggtcacttcggccacgggaggagttcccacgactaccaagggcagtttcctacccagggaccacggagacctggcacgcggcttttaggaggcgagtcccgggcaggtgtctacttgcaactttaactttgggtgggggcggggcactcacgcttcggaccttcctcgcggccccggggaccccgctcccggcccgctccctcgggggagcgggaagcgcagtgccctcgccgcccacccgtccgcccacgcatcagccggcggcggcagccgctgggccgcggagaggagcgccgggctagttttaatttcctctgttttgcctgcactcacgccccctcctggcgtccccgcatcacctcgctccgccgccgccgtcgccctcagcccgcggccgccgccgtctggaggcggcgatgactcaggcctttccaggcggcggcctggggctgagggctctggctggggaggagcgccaagcatgagcggggaggggggctaggggtctcgaaccgtctttttttctgagctggacaacaccaagatgcaagtgtgacctgtagggatgactgttcctctctgcctcagtttccccatctgcaaagtgggtggtggagacctaacacgtgtaaagggcttggtcatcctgagaatcaggtaatttactgagcatctactatgtcccaggcactgtgaacaacagacaaaaatgcctgcctgtgtgaaattgaatattctttttcttttctctctcttttttttttttttttggtagagatgggcatctcgctatgttgcccaggctggtctcgaacccctggcctcaatcgatcctcccaccttggcctcccaaagtgttggcattccaagaatgagcctccgggttggatgtgaagatgaatattctatggggtgagacagtcaagaaatacgggaaaaaagtaaagtacataagatattaggaggaaggggaagtaaactttaaacagagtgattggagaaagggacttttttatttatttatttatttatttatttatttatttatttgagacggagtcttgctctgtcgcccaggctggagtgcagtggcgtgatctcggctcactgcaagctctgcctcccgggttcaggccattctcctgccttagcctcccgagtagctgggactacaggcacccaccaccacgcccggctaattttttgtattttttagtagagacggggtttcaccgtgttagccaggatggtctcaatctcctgacttcgtgatctgcccacctcggcctcccaaagtgctggaattagaggcgtgaaccaccgcgcctggcgagaaagggacgtttaagcagagacctgaagtgaggaagggaaccatctggatatctaggggaagagagttccacgcaacaggaacagcaagtgcaaaggccctggggcaggagtgtttgaggaccaggaaggaggccagtgtagttggagtgagccagggggagaataaggaatgatgatgtttgtaaaatactttacaagtgtctgggacatggtaagtttttcaaatagtagctaccattgttgttattatttgaggccgggcacagtggctcatgcctataatcccagcactttgggaggccgaggagggtggatcacttgaggccaggagttcgagaccagcctggccaacatggtaaaaccctgtctctactaaaaatacaaaagttagccgggtatggtggtgcacgcctgtaatcccagctacttgggaggttgaggtgggagaattgcttgaacccaggaggcagaggttgcagtgagccaagatcgagccactgcactccagcctgggcgacagacgagtgagaccctgtctaaaagaaaaaaaagatgagttcttgccagcttgttctaaagctttcactgatgagtgctgaacactttgcagatgcaatgttaacaactgctgcaacatccataaacagtacagtgacacccctatttccaggtgaggaaactgagctcagagaggagagggacccagatcaggggaacccagcagggaagtgggggcccaggttttgaaaccaggactgtctgatttcagaccctaagaccaactgggctccaggcctcctggcttagacaatttgggacccaaacaaactttctcactctctggccatgggtgctgtgggaaactgccttagttcagcgcatccaggcttctccaaggagtggtctgtgctcgagtttgcacttgcttgcatttaactccttgcctcccacctccccaacgtttccaaaactcttctcaccaaaggtgccaatttgccaggtccacaccctcatgccagtcctcattagatcattctcacagtcagtcagtccccactcaccatcaccttcttgaaactcctttttcccttgacttcagagacacggtatcacttcctagttctgcacccacctctctggctgtgccgtcgctgtctcctgctactccctaaaactctgtatctttcagggctttgtcctgggttccctgccgctctcattctgcctggaccatcacacccactctcaaggttttggctccatctgggacactgcaacctcaggacctttgaacttcctgttccttctacacaaaatacatcaaggatgccccccatggcttgttcctttacttaattaatgtattttttagagacagagtcttgctctgtcacccaggctggagtgcagtggttcaatcatagctcattgcagcctctaactcctaggctcaagctattctcctgcctcagcctcccaagtagctgggactacagatgcgagccaccattcccggtcctttatttaatttatatctctgctctgtcattgtgtgggtcagagccatgccctgcccttcccccagaaaactacatttcccagattccattgcatactggcttcctggtcggtttatccaatgggagccactggagggagatcggagattggagaggaaggcagaagccagggtgtttctctcctgtgtctgcttggggtggagggtgttttctgacagtggctacacctcctccatagtgccagttcctccccaagggtcccttccttatcacatcctctctttgccatgtccctccagtagctttctgctgtagcttatgccagatttcctcatcatcccatgtggcttctcaactctttcttctcccacttaaccaattccctgtattaaatttcccctctctgaaacacgtagtttgtttccctaacaagaccctcagtgatatggtgatcttatccaaaggaccttccctggccacctcatctacaatctgaacaccccaccactctgtgccacttaccctactttagttgttttttgttttgttttgttttgagatggagtctcgctctgttgcccaggttggagtgcagtggtgaaatctctgctcactgcaacctccatctcctgggttcgagtaattctcgtgcctcagcctcccaagtagctgggtttacaggtgcatgccaccatgcctgggtaatttttgtatttttagtagagatggggtttcaccatgttgaccaggctggttttgaactcctgacctctagagatccacccacctcggcctcccaaagtgctgggattacaggcatgagccaccatgcctggccactttagttcttttatctttttttttaaggcgaggggctgggcactctgttgcccaggctggagtgcagtggtgcaatcatagctcactgcaacctcaaactcctgggctcatgtgatcctcctacctcagcctcctgaataggtgagactacagaggcacaccaccgtgcccagctaattttttaagttttctgtagagatggggtctcactatgttgcccgggctggtctcaaactcttgggctcaggcaatccacctgcctcagcctcccaaaatgctgggattgtaggcataagccaccacgccagaccctaaaactctttttaaagacccagcaattccatctacccaagagaaaccaaagcatatgtctatgaaaagacctaaacatgaatattcatagcagcattggtcataatgaatgaaacaatccaaagacccatcaactggtgagtgaataaacaaattgcggtacatccatacaatggaatgccattccaccataaaaaggaatttgctcctgatatatgctacaatgtggatgatcctcaaaaacattttgctaagtaaaaggagccagacgcaaaagaccacatagtttatgattctatttatacataatgtccagggacagcaaatcaatacagacagaaagtagacgagagattgcctgcaagtgggggtgggagtggagatggaatgcaaatgggcacgggggctgttttggaggtgatgaaaatgtcctaaaattggatcggggtgatggctgcacaactctgtaaatttacgaaaagtcactcaattgcacgcttacacaggtgaattttatgctctgtaaattatacctccataaaactgctgaaaagggaagatccaccaggcacggtggctcacgcctgtaatcccagcaccttgggaagctgaagcgggagaattgcttgaagccaggagtttgagaccagcctgggcaacgcagtgagacctcatttctctctcttttttttgagatggagtctcgctctgtcacccaggctggagtgcaatgggatgatctcggctcactgcaagttccgcttcccaggctcatgccattctcctgcctcagcctccggagtagctggggctacaggcgcctaccaccacgcccggagaattttttatatttttagtggagatggggtttcactgtgttagccaggatggtctcgatctcctgacctcgtaatccacctgcctcggcctcccaaagtgctgggatttacaggcatgagacaccttgcccggccgagacctcatttcttcctattcatttatttatttgagacagagtctcgctctgtcactcaggctggagtgcagtggcctgatcttggctcactgcaaccttcccctctgggttcaagtgattcccttacctcagcctcctgagtagctgggattacaggtgcacgccaccacacctggctagtttttgtatttttagtagagatagcattttgccacattggccaggctggtctcaaactcctgacctcaggtgatcctcctgcctcggcctcccaaagtgctgggattacaggcataagccaccacacctggaccactgccatttttttttttttttttttttttgagacagagtcttgctctgtcacccaggttggagtgcagtggtgagagctcggctcactgcaatctgtgcctccagggttcaagtgattctcgtgcctcagcctcctgagtagctgggattacaggggcaagccaccatgctcagctaatttttgtatttttttttttttttagtagaggtagggtttcaccatgttggccggctggtctcgaactcctgacctcaggtggtctgcccaccttggcctcccaaagtgctaggattacagctgtaagccaccacacctggcccctccccaccaaaaaaatttttttaagtagctgggcatggtggcatgtccctgtagtaccagctacttgggagactgaggtgggaggatcgcttaagcccaagtgtttgaggctgcagtgagctatgatggcacctctgcactccagcctgggcaacagagcaagaccctgcctgtacaaaagggggaggcatttttaaactttacttgcaagctccctctttgaggtgccctgcactgtactaacacaagaataggtgtctccttaaattttgagcccaagattccttgcttgcatcaccctggtcctggcaatgatgtacccacggtcagaaatgagagattatttactttttacccctccttctccatcactcctcttctattcaaaccagcaccagagccagctaatcctgatgcagaaatatctcaagaaagtgtcccctcttccccatcatcatcactgtgaacatcgtgctggtaagccactgaaaaaaaatgtttcttctggggctaggcgcggtggctcatgcctgtaatcccagcactttggaaggctgaggtaggcagatcacttgaggccaggagttcgagaccaccctggccaacatggcaaaactctgtgtctactaaacatacaaaaaaaaaaaaaaaagtagccaggtgtggtggcacagacctgcaatcccagctacttgggaggctgaggcaggaaagttatttgaacctgggaggcagaggttgctgtgagcagagatcacaccactgtactccagcctgggcaacagagtgagactccatcttgaaaaaaaaaaaagtttatttcccttgaaatttctgggtggtaaaaaactcgtaactgttggaaaaatatcaataattgctgagatttatttagtactatcatgttccagacaccatttgcagcaaagtacatgtaacaactcatttaaccctcagaatacctatatgcaacagacagaattataattttcttttgtttgttttgggattttgttgttgttgttttgagacagggttttgcctaccgtcacccaggctggagtgcagtcacatgatcatacttcactgtagcctcaacctccctggctcaagcgatccttctgcctcaaccttccgagtagctgggactacagtcacatgccaccatgcttggctaatttttttttatttttggtagaaacagggtcttgccatgttgcccaggctggtctcaaactcctgggctcaagcgatccccttgcctcagcttttcaaaacactgggaagacaggcatgagccactgcacccagctaggcaaaggtttttaaaataggacactaataagcactagccatgaaagaaaaaattatttgaactacattaaatttttttttttttttgagacggagtctcactctgtcaccgaggctggagtgcagtggcatgatcttggcttgctgcaagctctgcctcccgggctcatgccattctcctgcctcggcctcccaagtagctgggactacaggcgcccgccaccacacctggctattttgtatttttagtagagacggggtttcaccatattagccaggacggtcttgatctcctgacctcgtaatccgcccacctcggcctcccaaaatgctaggattacaggcatgagccaccacacccagcctgaactacattaaaattaagaaatcctggctgagtgcagtggctcacgcctgtcatcccagcactttgggaggccggggcgggaggatggtttgaacccaggaatttgagaccagcctgggcaacacggtgaaacaccatctctaaaaaaactacaaaaattagctgggtgtggtggtgtgcacctatagctccagcaactcggcaggctaaggtgggaagatcgcttgagcccgggagatcgaggctgcagtgagccgtaattgcaccactgcactccggcctgggcaacagagtgagaccctgtctcaaaaaaaaaaaaaagaaatgaaatgaaattaaggaattctattgattaaaagacaccactaagagaatgaaaagaaaagctacagagaagatatttgcagtcattatgtccaataaaaatctcatatcctgattttatagttatgtaaaatatgaatatgtatctatgtaaaatctagatacacacacacacacacacacattcctacaaatcagtaagaaaaaaccagacatctgaacagagaagtgggcaaaagacttagacatttcacaaaagtggatatccaagttgtcaataaacatatgcaaaggcacttaattcatcatcaggcacatcactcatcatcaggaaatgtaaatgaaacccacaatgttcccagcactttaggaagctaaggtgggaggatcacttgagcccaggagttggagaccagcctaggcagcataaccagaccctgactcaaaaaaacaaaaataaatttataaataaacccacaatgcaatactatttggcacccatcagaatgtctaaaactaaaaaaaggccaggcacagtggctcatacctgtaatcccagtactttgggaggccaaggtgggtggattgcttgagctcaggagttccagattagcctaggcaacagggcaaaaccccgtctctacaaaaaaattcgccaggagtggtgctgcatgcctgtggttctagctacttgagaggctgaggtgggaggatcgcttgagcctgggaggttgaggttgcagtgagcacagatcgtgccacagcactccagcctgggtgacagagtgagaccctgtctcaaaaaaaaaaaaaaagaaagaaaaaaagaaaagaaaagaaaaagaaagacaacaccaagtgttggggaggatatggagcaactggaacacttcatacactactggtggaagagttgttgactttttggaagagtctctgaaactttggaagactgtacagcagtttctccctatgacccagcaattccactcctacatatatacagttgagcttcatgattcgaaaattccagattggcaaatttgcctacttgttgcaatttgtttatactctaagatcaatactcgctggggcatttgtggtcatttgtggacatgcacagtgataattttttttttcttgcttagaaacagggtggagtagctgggcacggtggctcatgcctgtaatcccagcactttgggatgccaaggtgggcagatcacttgaggtcaggagttcaataccagcctggccaacatggtgaaatcctgtctctactaaaaatacaaaaattagccaggtatggtgggtgcacacctgtaatcccagatgcttgggaagctgatgcacaagaattgcttgaacctgggaggcagaggttgtagtgagacaagatcatcgccactgcactccagcctaggcaacaaagtgagactgtctcaggaaaaaaaaaaaaagaaagaaaagaaagaaagaaagaaggaaagaaaggaaagaaggaaagagagagagagagaaggaaagaaaaggaaaggaaaggaaaagaaaagaaagaaaaaagaaaagaaaagaaagaaaaaagaaaagaaaagagtgcagtggtgggattgcctttacctcctgggctcaagcgatcctcccaagtagctgggacttcaggcatgcagcaccacacttagctaattaaacaaattttttttgtagagctgggcgtggtgcctcacgcctgtaatcccagcactttgggaggctaaggcaggtggattacctgaggtcaggagttcgagaccaacctggccaacatgtcgaaaccccatctctactaaaaatacaaaaattagccgggcttggtggtgtgtgcctgtaatcccagctactcgggaggctgaggctcaagaatcacttgaacccacgaggtggaggttgcagtgagccgaggtcgtaccactgcatttcagcctgggcaacagagcaataacctcgtctctacaaaaaaaaaaaaaaaaaaaaaaaaagcccgggcgcagtggctcacacctgtaatcccagcactttgggaggccaaggcaggcagatcacgaggtcaggagatcgagaccatcctaacacggtgaaaccccgtctctacaaaaatacaaaaaaattacctgggcgtggtggcgggcgcctgtagtcccagctattcgggaagctgaggtaggagaatggcgtgaacccgggaggcggagcttgcagtgagccaagatcacaccactgcactccagcctgggcgacagagcgagactctgtctccaaaaaaaaaaaaaaaaaaaaaaaaaaattgtttttgaaatggaggtctcgctctgtcgcccaggctggtctcgaactcctgggctgaagccatccttccgccttggccacccaaagcactgggattatgggcgtgagccattgctcccggcctgacaacatactcagtcacccaaccctgttgaggtctaataaggagacactctgctttcttcctccagctctgatactacatgcaagtgtcttttttatggtccatttagtgccaagcttttcatatttttgtgctgtttgttggtgactctgctatcttcagtggcccccacgcaccgtgctgaagtgtagtctagtgtttctaagtcaagaaggccgtgacgtgtgtcacggagaaaagacgtgttacagaagcttcattcaggcatcagatctagtgctattggccgggagttcaatgttaatgaatcaaaaaataaatatatatgtgatatatatatatatatgcgtgtatatatatagatatgattgatatatatatatgatattctaaaacagaaacacacataaaacaaagttatggctgggcgccgtggctcatgcctgtaatcccagcactttgggaggctgaggcaggcagatcgtttgagcccaggagttggagaccagcctgggcaacatggtgaaatcctagctctacaaaaaattagccaggcctggcggtgcatagtcccagctactcagcgtgttgggaggctgaggtgggagaatggcttgagtccggaaggcggaggctgcagtgagcctagatcacaccaccgcactctagcctgggggacagagtgagaccctgtctaaacaaaacaaaacaaaaaaagttatatattattcagttgacaaaaacgttgtggtcagaggcttttgacaaaaatagcaagtgttggtgaggatgtggaaaaataggaaccctttgtgggaatgtaaaatagcgcagtcgccgtagaaaacattatcgtagttcttcaaaaacttaaaacatagttaccatatgacccagcaatactttttcttttttgagacaggatcttaccctgtcacccaggcaatggtacaatcatggcgcactgcagccttgacctcctgggctcaagtaatcctcccacctcagcctcccaagtagctgggaccacaggcacagctaatttttgtatttgttgtagagacacggtttcaccatgttgctgaggttggtctcaaactcctgggctcaagcaatccacccacctcagcctcccaattgctgggattacaggtgtgagccaccgcgcctggcccagcaatgccacttctgaatacgtacacaaaagaattgaactcagtgtctcaaaaagatattggtacacccgtgatcatagcagtattattcaaaaaagcccaaaggtgaaaacaaccaggccgggcgcggtggctcacacctgtaatcctagcactttggaaggctgaggtgagaggattgcttcaggccaggagttgaagaccagcttgagcaagatgacaagaccccatctctacagaaaaaatttaagaattagccagccgtggtggcatgcacctgtagtcccagctacttgggaggctgaggtggaaggatccctggagcccaggagatagaggttgcagcgagctgtgatggtgccactgcactccagcctgagtgatggagagagacctcctctgtaacattaagacttttttttaaaaaaaagctgaaaacaacccagtgtctatttattgatgaatgaatggataaacaaaatgtggtatatccatacatggaatatgattcagcctttaaaaggatggaaattctaggccaggcatggtggctcacgcctgtaattccagcactttggaaggctgaggcgggcggatcacgaggtcgggagatcgagaccatcctggctaacatggtgaaaccccatctctactaaaaatacaaaaaattagccgggcgtggtggcggccgcctgtagtcccagctattccggaggctgagatgggagaatcgcttgaatctgggaggcggagcttgcagtgagctgagatcgcgccactgcactccagcctgggacagagagcgagactccatctcaaaaataaataaataaataaataaatgactaaagtgataaattttatattatgtgtattttaccacaattaaaaatttttaaagtcttccatttaaacatgcacaacctcttctatgagtcactattaccagctcactaaattctaggccaagtgcagtggctcacgcctgtaatcccagcagtttgggaggctgaggcaggaagatcttatgagcccaggagttcaagaccggcctggacaatatagtgagaccctgtcactacaaaaaataaacaaaaaaaattatgtgggcatggtggcacacgcctgtggtcccagtgactcaggtggctgaggtgggaggattgcctgagcacaggagtttgaggctgcagtgagctgtgatcgcgtcactgcactccagcctgggcaacagagcaagactctatctctaaaaataaataaataaggtccagcacggtggctgacgcctgtaatcccagcactttaggaggccgaggcaggcagatcacgaggtcaggagtttgagaccagcctggccaacatggtgaaatcctgtctctactaaaaatacaaaaattagccaggcgtggtagcacgcgcctgttaacccagttccttgggaggctgaggtaggagaattgcttgaacctgggaggggagggttgcagtgagctgagatcgcaccactgcactccagcctgggcgacagagcgaggctctgtctcgaaaaaaatataaataaataaatgaataaataaattctaaaatccttaacccagctttcgaagcctttacagtcagatcacaaccttttcaagctcacttcccttctcctatctgcacccaccataggcatcaaccacacacttaccctagttcccatttccagaaacttcccctcttttaaacatggttagaatcatgtaaaataagggtaaacccaccaggtcttgtcagcatgaccaatgactttcttctgtgtccaccctccagtcttcactcgctcatccttcaaggcccatctcaaatgccacctcccccaggaagcccacttgactcttgacatctggcactttgtaccatgtgtcggctgcatctgtctcccaaatttggcaactgacagccattcagagcggactgtgtcacgtccctcctgagtgagtgagtgcctctatcagtgtctttctcatagaaattactagagaaattaggaacagaaacaatgtgggccgggtgcagtgactcatgcctgtaatcccagcaccttgggaggctgaggcggatcacttgaggtcaggagttcgagaccagcctgaacaatattgtgaaaccctgtctctactaaaaatacaaaaattagctgggccctgtggctcatgcctgtaatcccagcaccttgggaggctgaggcaagaggatcacttaaggccaagagttcaagaccagcctgggcaacatagtgagacccccatctctaccaaaaaaaagaaaaagaaagagaaaaattagctggatgtagtggtacacacctgtagtcctaactatttgagaggctaaggtaggaggatcacttgggccaaggaggttgaggctacagtgggctgtggtcacaccactccactctagcctggtcaacagagcaagaccctgcgtcttaaaaaaaaaaaaacaaaataaaatttaaaaagaacccggctcaccatgtgctcatcatgtattcttcctgggattcaccaggactctcttagagcctaaaaagtgagaagctatttgccatttcatttgatggctgaactggctttgcctttttgtttctttcttcttgtgcaatgacacctgtcttctcatctattaagcaaggctagttactagctgcccaggattgttggaactatgtgtaaagtaagagtaaactgggaccgagagtctactgggtccccaggagcaacaagaacaaccttttccaggctggatgcagtggctcatgcctgtaatcccagcactgagggaggccaaggtgggtggatcacttgaggccaggagttcaagaccagcctgggcaacatggcaaaaccccgtctctattaaaaatacaaaaactagccaggcatggtggtgcacgcctgtagtcccagctacttgggtggctgaggcatgagaattgcttgaacccaggaggcagaggttgcagtgagatgagatcgtgccactgcactccagactgggcgacagagtgagactctgtctaaaaaaaaaaaaaagagagaaagagaataagcttttgtatacagtcttcatggaatctactctccctactctctgctctttcctggtgacttcttggtttgtggctgcactctggatggatgaagttgcaagacacactgaggtggtgtgcacctgtaatcccaactacttgggaggctgaggcaggagaattgcttaagcccaggagttcgaggcctgcctgggcaccatggcaagaccccatctcaaaaagaaaaaaagagatagaatgggcttccaccttggcagggaggacatgtcaatgttctcagacaagagttccctagatatgggaataaaatgttcctgtcatgacaagttttttcccaacacagccagactcaactcctccagaagttaaatctactccaccccttgaaagcacaaactaccacccagtgcttgttgcatagtacaacgcttgagatacagaaggctctcaatgaatgctctctaaatgaatacatgggccgggcgcggtggctcacacctgtaatcccagcactttgggaggctgaggcgggtggatcacctgaggtcaggagtttgagaccagcctgaacaacaatatagagaaaccctgtctctactaaaaatgtaaacattaggtgggtgtggtggtgtgtgcctgtagtcccagctacttgggaggctgaggcgggagaagagcttgaactcgggaggtggaggttgcagtgagccgagattgcaccacttcacgccagcctgggcgacagagtgagaccccgtctcaaaataaaataaaataaaataaaataaaataaatgaatacatgcatgtaggaacaaatgaaaacagcacattactgtctctcaggcactaacactgaatcctggggctacaaagtcattgcccacaccagccactgggctcatcagaaacccacacataccaggccaggcgtggtggctcacgcctgtaatcccagcattttgggaggctgaggcaggcagatcacctgaggtcaggagttcgagaccaacctgaccaacatggagaaccctcgtctctactaaaaatacaaaattagctggatgtggtggtgcatgcccgtaatcccagctactcgggaggttgaggcaggagaatcacttgaacccaggaggcagaggttgcggtgagccgagatcgcgccactgacctccagcctgggcaacaagagcgaaactccatctcaaaaaaaaaaagaaagaaagaaagaaatccacacataccatatggttggcctacatggatacagtcactggtgtgatgatgatacaagcatgtccctgtgctcatggtccctgaacatgcacacagtcaccaaacatacacatacacgcatgacaccacagacacatgcctatggggccaaagttagagtgaggcaagttatgcaagtgcagagggggagcccatatttatttaaaaatttgtttttattcattatagatttttcttgcatcaatttagatttttcttaaaatgttccattaaaatattatttatcttggttactggtttttatttttttggggggcatacccttaaattttgtactatagctgaactctgtaccatgtacctgtcaccctagctactcaggaggctgaggcagaagaatcacttgagcccaggagttggaggcttcagtgagctatgactgcaccactgcactccagcatgggtgacagaacaagaccccgtcttagaaataggcccggcaccgtggctcacgcctgtaatcccagcactttgggaggccaaggcgggcagatcatctgaggtctggagttcgagaccagagtgggcaacgtggtgaaaccctgtctctattaaaaatacaaaaaaaaaaaaatttagccggctgtggtgctgtgcgcctataatcccagctactcgagaggctgagcaggagaatcgcttgaacccgggaggcagagattgcagtgagccgaaatcgcaccactgcactccagtgtggacgacacagcaagactctgtttcaaatatcatcatcatcatcatcatcaactttttaaaatgtttgcacccgcggcgagtatctcacctgttttaccctgacctgggcacccccatcccacatacgcacgcgcccacgcacaggtgcacaaccacacacattcacccaccagtcacacagacgcacacagtccctgcacaaacctcactcgaccactagatgtcgctcaagctccataatcttaaatccagccccaaggggctctttcctacactaactcggagtctttaaatttccttttacttccctccactgggacatttacatgctctaaaggagccccaggagaacatcgtcttacccctaaacaacagtgccctatcggtggaatgtcaggcacaggtaaagaagatgggttttctttctttcttttttgtggagacagggtctcagtctgtcgcccaagctggagtgcagtagtgcaatgatagctcactgcagcctcaaactcctgggctcaagtgatcttcacacctcagcctcctgagtagaactacaagcctggccaattttttttaaagttactgcagaggccgggcacggtggctcacgcctgtaatcccagcagtttaggaggccgaggcagacaaatcaagatgtcaggagttcgagaccagcctggccaaaatggtgaaaccccatctctactaaaaatacaaaaattagctgggtgtggtggcacgcccctgtagtcccagctactcgggaggctgaggcactagaatctcttgagcccgggaggcagaggttgcagtgagctgagatcatcacaatactgtactgtactccagcatgggtgacagaacaagactccatctcaaaaataaaaaaaaaaaaagaaataaaaagaaaaagttattgtagagatgggatcttgctgtattgcccaggctggtctcaaattcctggcctcaagagaccctctggctttggtctcccaaaatgctgggatcataggtatcagccatcacacctggcctgaagaatggattttcttggtgccttccatccaggagcgagtgttcccctgacactctcttgataaaagaatcctgtggtttgagaaagaaagacactctgtgtgtgtgagggggtccatccatccatccattcatccattcagcagatatttcttgagcacctactgtgtgtcaggctctgctctagacactggagaaacaacaaagctagctgaaccctgataaactgccgctctagtggggaaacagagaatgaatgaatagaagaatcatagaaatgtggaaacgagggctataaagaaaaatatggccgggcgtggtggctcatgcctataatcccagcactttgggcggcagatcacctgaggtcaggagttcaagaccagcctggccaacatggtgaaaccctgtctctactaaaaatacaacaaaaactagctgggcatcaggtggcacgtgcctgtagtcccagctactcgggaggctgaggcacgagaatcacttgaaccggtgaggcaaagcttgcagtgagccgagattgcgccactgcactccagcccaggcaacagagtgagactcagtctcaaaaaaaaaaaaaaaaagaaagaaagagagagaaagaaaaagaacacggagtaagcactcagagagtggcagcagggggctatttcacttagctgttcagggtgagcctcttggaggaggtgacatttaagcagaaatcagagataaatagctaccagggggaacagtgtcacaggcagagggaacagcaagtgtgaagtccctgaggcacgtgatctaaactgaattattccttctccccatcctctgaaagccccaggaaagagttggtcccaaacccagatagtgccaacgatgtagctagatcttagggaggccttcgcagggatcaggaaggcatcttttccacaaggaaaatagtggggctcagaactgtcaagctctctggtagtcactcccaggccagaacccagaacatcttggatagatcctggatgaatggacaatgcctctgacaggccctgctttcctgttctcctgctctctgggtcaaatccaaacttctgcccacagcttacaagttcctaagtggtctggcttccccggcctcatctccccgcgacctctccagccacaccagcgtccacactgcttctgaaactcaccaagcttgttcttaccccagggcctttgcaccttctgttcctcccaccttcaatgctcttcccccagacacccacaaggctccctctctcacctccttcagatgtcacctgaaacactacttccttagagacaccttccctgaccacactggctcaaatagcccccaccttgtaatctttttctgtttttttgctttgagacagtcttgttctgttgcctaggctggagtgcagtggcatgaccttggctcactggaacctctgcctcccaggttcaagcaattcgcctgcctcagcctcctgaatagctgggactacaggtgtgcaacaccacacctggctaattttttgcatttttagtagagacggggtttcaccatgttggccgggctggtctcaaactcctgacctcaagtgatccactcaccctggcctcccaaagtgctgggattacaggcgtgagcctccatgcccgactgctatcactctaatcttttttttttttttttttttttgagacagagtttcactcttgttgtccaggctggagtgcaatggcgatcgcagctcaccgcaacctctgcctcccaggttcaagcaattctcctgcctcagcctccctagtagctgggattacaggcgcctgccaccacacccagctaattttttgtatttttagtagagacagggtttcactatgttggccaggctggtctcgaactcctgacctcaggcgatccacttgcctcaacttcccaaaatgctgggattacaggcgtgagccacagcacccggctccagtctaatcttctatactttatctgttattcttcatgctacttgcattgtattatatgtatatttagttgccgacaccgtattacatggttattcggctcttttctgtctcctctgctaggtcaactccaggagagcagggatttgatgactcagttggtggctgtatccccagtgcataatcatatctgttcattgaatggattaaccaatgatttctaggaaggacccctgggcccatcagggacagggaagaagtctttggaaagtgatggagggagcgaagagtgggtagagcatcctctctgcagacccctcccttccctggggtgccaggcttggtgggccaacgccaagggggtgtatggggcgccgagactgtttcacaaccatgtagttcccgcggtggccgcctggaggcactgcagcccgcggcaggattccaccagccccgccctaacggattacctcatttggccacgcccccgttgtcctttagccccgcctccactgacctcgttagtcccgcccccaaagcaactccctcccagccctgggggctgtaggagtcaccctccaattgcaattctggcagcaaactctggcatcctagccaatcttggtgagaagccagaaaatctagtgcccccctagcagggagtggaggagaagccacagggggtggttctctgtctcctctgctaggtcaaggataattcaacttgattcctggctcattttttttccactggtttctcaagtgtgtgcctcttttggtctctcgtctcccaggtgtgtctcttggcttctctcaggctcacacatccattgagtacctattgtgtgtgtcctcatgcctggggctgggcacactccctatcccacccagcgcgtgggtgctgagatgcgtggggaaatggaggagcgagggaggggaccccacaatctctcctcgtggcctggaaatccttctatctggagtctaacctccattcctcccaacacccccctcggggtgagcacaagggtctgattcttttcttgataaggggaaggtgcccaaattgtttctcccctgcctatctacctaaaagcccacctagcaatgtcttcacggacgctgtccacacccatggagcggattatttaacaagagggtaatcgtgtgggctcaggagccggactgcctcggttcagtcccacctctgtcactctcgagcttgagcaagtgatttaacttttctgcgcctcagtttccccatccataaaatgaggtaacaataccatgctctagtagggaggaggcagagggggttaaatgccttagtctgtgctgtgtgattgaaacagcacctctcaaattagcacgtaatgaatgatcactgttatcataatgactattttattatttttgatcccagcttccctgtgaactcctacagatctgagaacttgggggtgctctcactcccaagatggaggaggagaggggctttccaatagcaaaagagagcgtggacgccccacattttgcaagcctccctgagcctgcccaagagaaaggtgccatggggagggagacccgcttctgtaagggtatgaatggcgtgtgcggttgtgagcaaggcaccaagatacacacacacacgtgcatggatggacacgtttgcacacacagcgcttgcacacacacacacccttttagagtgatttacccaaaggtacagaatagcacacgctcactccaaggctctcacacggccacacacctggccacacacgtattgtacaacacccagtcatctggagccagtaatgaggacacggtcacacacagactctgtctcacgtactgatcacaccccaactcgggcactagttggacaagccccccaaccgccacacacacaaactccccccggtcacacccaaccacgacacaaagacacacacgtttaccctgcacccccacagcatttcacacgcgtccccgtcagtcactctcacgtgagtcccgtcccctgccccacactgggggctgcaggcgaggagtggagggcttcagaaactgggcatctcggccccgaagaggaagtcaagggtaagcaaccgcccccctccaatgccccctgaagtttccctcccaaccccattcagctccagcgagatggcggggtgggggctcggggccatggaggggttgagaaccccaaagacgccaccccccaaaccagcccagcttgaggctggatttgaagcccccctcgtcctctcccaagccagagagtgcacgtcccggcccctcccccgctgcgacccccgcccctcgccgccctgcagctgggggggcttgtggagcctcccaaccccgtttctccgggaaccctccgcgcccccctcctctcccggagccacccgcgcccgcacctgcccgccgggcccctacctgtccggccaggcctgagcacagcagcagcagcagcggcggcgggaccgtgagcggccacatgacgcgcccctagcccggcgtcccgacccccgcccgccctagcggcgcctcggcgcggggaccgccaccaggcgcgaccccgcccgcccggccggggcgaccctgcgccgccgcctcccccgcctcgccggcggccgggattccgccccacccccgccccctcgctcgctccgagtctttgttgcgggctccgccccccgccccgcccccagctcctcttcgggagcagctcgagcagggtcgggtgggggggtgggggcggggaagtgggggagccagcgccggcgaggggacctgaggacaggacttggcagcgccccccaacccccaggccattccgggagcgggtcgcggaggtgggggaggggtgcccgtcacgtgtttgtaaatttcaccctccgggggcatttcccacgttgcaggtgggacggggacgaatggttgggggagaggaataggaggaaggcctggtagcagagaggggaaatgatgaacgccccctccctaaaaactcaagagtcaacagggaaactgaggcagaatctgaaattggaagttggaggaggggtcaatgccaggacaagaggggtgaggcatagatggagacggggaataagaggaaaaaattgaggttggggggacaggagaccgagaatcaggcaagaggccaatggaaatggccacgtgggtgggcttggcctcaaaaaggggcgtctcgttttcactctccccgggcgccccatttccccaccagtcctcccgctggaagcctccccgcctccgccacacctggaagagtttctcttcgctccctgtttcaatagcccaagatgaaagaccacatcccccgagagaatcaaaatattaacaccgcctccacgcgaagccatttgcatatgaagggcgtccttgtctagcctcactttcgggaggctttccagcctttctctgcctctcactcctccaaaagtctccctaggccgggcgcggtggctcacgcctgtaattccagcaatttgggaggctgaggagggtggatcatctgaggtcaggagttcaagaccagcctggccaacatggcaaaaccccacctctactaaaacatacaaaaattagccgggcgtggtggtgcatgcctggaatcccagctactcgggaggctgagacaggagaatcgcttgaacccgggaggcagaggttgcagtgagcagagatcgtgccattgcactccagcctgggcaacaggagcaaaccttgtctcaaaaaaaaaaaaaaaaaaaaagtgtccctagtcgtctttcctccccacagcccctctagggattcggatatatgtaggcagaggtggaggaggggggcgggcaaataagtcagattggaaagaaatcgggcataaaatatgcgaggccaggaagcctggcatttttgtgaccctgatactgttgggctaggaggggtctccccagacgctggtggggcctcgaccccagctggtgtccaggctcttaacaccatcgcaagaatgaattcaaggaggaatcagaaaatcatgaaaagttcggagatttttttgttaagggaaaagtccacacttgagaaaagggagtgggcgtacttaagagagagagatgggcaaggtggtttgggactgctacctttatgtgtctctttttttttttttttttttttttttttgagacaaagtctcgctctgtcacccaggctggagtgcagtggtgtgatctcggctcactgcaacctctgcctcccaggttcaagcaattctcctgcctcagcctcctgagtagctgggattacaggtgtgcgccatcacagccggctaattttttgtgtttttagtagagacagggtttcaccatattggccagcctggtctcaaactcctgacctcgtgatccacccgccttggcctcccaaagtgctgagattacaggcgtgagccaccacaacaggccactgtgtatctctttaaccaagggatggaatattcatgaaaactggaaaaaggtggactgtggtgccacccacttttacaccaaatttgggtgtccctggaattgtcaagggcgctggtgggtgggtaattttagtattttaatgagtacataatgagatcctaggtgaaacctaggtagaatgtaacgccatgttgggtccagtaggtcttagccagcttggtccacaccctggttttcaggatcttatcagcccatagcctctagtcatgtgaaacggctgcctgtgaccaccctggatcattcctgtctcaaccctactggggataaaacatgtcgatgatggttttgtcaggtcaatgagaaagagcttggtgacccacagatctgggttcaaccctggtgctgccacttcttggccatgtgaccttagggaaaaagctttccccctcttagaagacctgttttttgcagttattgggagacatctgtgactctaagcaaagagagcacctagctagcactcactccccagcacgccttgcaataaccaaccatgcactgggttgaggacactcatcatgggatgtggacacaaaatagagtctgagcctgcgaagacatcctgtttattcttctatctcttttttttttttttttttttgagatggagtctcacactgtcacacccaggctggagtgcagtggcttgatctcggcttacaacctctgccttccgggttcaaggaattctcccgcctcggccttccaagtagctgggattgcaggtgcctgccaccaggcctgtctaatttttcatatttttagtagagatggggtttcaccatattggccaggctggtcatgaactcttgacctcaggtgatccacctgcctcagcctcccaaagtgctgggattacaggcatgagccaccgcacccatcctattcttctatctccttttcccaaatgggagacagtcctttgtgggcccttcaggccaagcctgcagttggcattgcataaaaggaggacattggttggtaggacccacaagctcttgaccaagagtgggtctcacggtcaagagtcagcactcttgactcatgaatgctgcatttcaggaccatgaacagtgtcctccttgggctctggtcactaagacgatcacagttacaactaagctacagcctgtgttatatggttggaatttggtcgatatgcacttagatctattccccactttccccctgctcccctctgtatcagggcaatggctcctgcaaattatctttctcaggttctctacacactacatttcccaggcttctttgcatctggttaggctcagccaatgggaggtctacaggcagattggagggtgccaagaaaggagaagccagagaatttccccccctccactttgagtgtctctagccatggctgctgtgcctcctctgtggtctcagtcccattaggtattccccaccatggtggggggtgggggcaggtgactggccaggtaactgcagctcctggattcaggtaactaccacctccctttgttgtttcagtccttgcaaagatgatagctagcaactagagttgattcacctgctccagtttgcgcttaaaaccaacctaatagggccaggtgcggtggctcatacctgtaatcccagcactttgggaggctgaagtgggtggatcacctgaggtcaggtgtttgagaccagcctgcccaacaaggcaaaatgctgtctctactaaaaatacaaaaaattagccaggcatggtagcaggtgtctgtaatgccagctactgaggaggctgaggcagaagaatcgcttgaacccaggaggtagagattgcagtgagctgagatcatgccattgcactccagcctgggcaacaatagtgaaactctgtctcaaaaaagaaaaaaacaaaaacaaaacctacctatcggctgagtgccatggctaacacttctaatcccaacactttgggaggctgaggcaggtggattgtttgagccaaggagttcaagaccagcctggccaacatctctgtagagatgctgcatctctaccaaaaatacaaaaatgagccaggcatggtggtgcacacctgtagtctcagctactcaggaggctgaggtgggacgatcatctgagcctgagaaggtcgagactgcagtgagctatgattactccactgcactccagcctgggcaacagagtgagaccctgtctcaaaaaaccccacaaaagcaaacaaacaaacaaacctacctacctaatacctcagtgtgtggctaattaaagtccccatattaaattctttctattgaatttgctgggatgggctgtttttctgactggaccttagtcaatgcattcgatgccgttggtcgttgactggtatggttagtggccctctgggtgtcctgatggcattgtggtttgtgtcctgttgaaccgggatctgtgctgccgtcaacatcctggttctgccagggtcagcattgtggtcagaattgtggtcactcctggtcattcttggttgtgttgtggtcagtgtggtgattagtactacagtcagtttcctggttatgctgtgctctgtcctagtgctatggtccttgtcctgagcttgctgtggataatgacctggccaagctatggtcaaaattatgattgagtcatactaaggtcaaagtcacactcagcatcctagttgcactgatatcagcttcaaggtcagcactgtggttaatgttaagaagagtgcactgtctatggtgcagtggtcagaattgtgggccatcattgaagagacatcaggatccgcttctcaaggatctattgtggcaaaatggatgaactggggactcagggtctggcactgggcacaggtcattctccatgacaggaagcagggaggcagggcgttggatcttgccatctggccattgggtttttctaattggcacttggacagccaattagacaggaacttggacagccatgggttcctgtcaccctctcacagcccacatctgtttcctcacaccctgcaccacccacttcatagagaaaatgatcatgaagtgaatgcctgccaacacatacctttgctcttgctaatccctgaatatattatttagaggtcctttggtagaatttagcagaaactcaacttgaactggattaagaaaaaaaatctattggctcatataacttaaacaaaaatgagggtagtggaattcagtcatggctggatccagggtttctgttatatcatcaggattctgtctctctccattcctcatctctcatttctcatctctcatttctcattccatgctgtcttttgggaaggattcacttttagccaagagatgacaaagatggtttccagaagcttctctcttccaagctcagcagcatcagcaaaaagagagcttgcaaaataatgtctcattatgcatcccaagttgtgtgcccatcctgaaccaattatgtattcagaggaattcattatttggcttggctaggtctggctcatagatcacccccacggagccagagagtgcagttagccttattcaacctacattggataggaagtgggaggtagagaaggatatagaatgttgaccactaaaagagagaaaggacactgtacaagcaaaaccaaaatatatggttttgggcagggggtggttcttggcatcatttcaaccccctagtatgcattccttattatagagcctgcaaagcgaaaatacttccagactcccttgcagctaaacttctgtaggccaattaggtttcatccattagaagcatgagaagtgggtggtggaagaaggtggaattaatcttcctgttatgctggtagaggcagctgctaagcacaattgggagacactggattttcctgcaggaatgttcctgtttccaattgtgagaacaacccgtttttgttgagagtccattgcagtaacaatgatgactgcctccgtatctctgaattgcaactttcctggtgttttcattgttttgttgttcctgttgctgttgttgttgttgttgtttttgagatagagtctcgctgtgtcacccaggctggagtgaagtgatgggatcttggctcactgcaacctccacctcccagactcaagcaatccttccacctcagtccatcccagtaaatgggactgcagttgcatgccaccacaccttgctaattttctgtattttctgtagagatggagtctctccatttgcctaggcttgtctcaaactcctgggctcaagggatccacccgcattggcctcccaaagtgctaggattacaggcgtgagtcaccacgcccagccatgctgttcctttttatggttcaataatattccattgtgtggatatcccatattttgttcattaattatggtgatgtagtcttaaagtcaaaaatccccactctaggggataattctccacctccctgctaataatagaggcagaagctcctgcttgggtgagttgggaggtgatggtttttgttttgtttttgtttttgttttgagatggagcctcgctctgttgcccaggctggagtgcagtggtacaatctcagctcactgcaacctccacctcctggattcaagcaattctcctgcttcagcctccagagtaactgggattacaggcacatgccatcacgcccagctagttttttgtatttttagtagagacagggtttcactatgttggccaggctggtcttgaactcctgacctcaagtgatgtgccttccttggcctcccaaagggataggattacaggggtgagccattgctcccagccgggaggtggtgttttgtagcaagtcattctatcggctttccctagatccctattctccagccttggttctgtaagcaccaagttccctggttttggttctcatttcctgcaactaaaccgtgattgatatgtgcttggaagattcattccctttatctgtctgaagagaacctcataattcacgaagccccaatactccaagctattcatgacctacctactcagtactccctcctggaccatgctggaaacatctctttaacaggaaccttcctgactcactgagctccagtgaagcacccaccactgggatacatcctctccatacattaattccttgagttcttacaacaaccctgtagggtaggcactgttatcccccatttaaaaatgcaggccaggtgcagcagctcatacctataatcccagcactttgggaggcagaggactgcagatcacttgagcccaggagtttgagaccagcctggcaacatggcaaaaccccatctctacaacaaatacaaaaagtagctaggcatggtggcttgcgcctgtagtactagctacttggaaggctgaggagggaagatcgtttgagcccaggaggtcgaggctgcagtgagctgcaattgcaccactgccctccagcctgggtgacagagcgagaccctgtctctaataaataaataaatgaaaactttgaggctcagagaggttaagtaatttgcccgaggtcacccagctataaagggcagacacaggattcagactcagttccatctgactcaaagccaacctattgaccgggtgcagtggctggcacctgtattcccagcactttaggagaccaaggtgggaggatcacttgagcccaggagttctaggctgcagtgacctgtgatggtgccactgtactccagcctgggtgacagagtaagaccttgtctcttttctttttttcaaaaaaagaaaaaaaaaaaggaagtagttggggtctcgcccaggtaattctttttttttttgggggggagatggagtcttgctcagtcgcccaggctggagtgcagtggcgcgatctcggttcactgcaagctctgcctcctgggttcacaccattctcctgcctcagcctcccgagtagctgggactaccggcacctgccaccacgcccagctaatttttttgtatttttagtagagacagggtttcaccatgttagccaggatggtctcgatctcctgacctcgtgatccacccaccttggcctcccaaagtgctgggattacaggcatgagccactatgcccaacctcacccaggtaattcttttaattaatgagagcccatctctactaaaaataaaaaattatctgagcatggtgccttgtgcctgtagtctcacctactctggaagctgaagcaggagaattgcttgagcctgagagattgaggcttcagtgagctgattgcaccactggactccagcctgggcaacagagtgagaccttgtctcaaaaaagaaagaaagaaaggggccaggcactgtggttcacaactgcaatcccagcactttgggaggccacggtgggtggattacttgaggtcagaagtttgagactagccgggccaacatgatgaaaccccgtctctactaaaaatacaaaaattagcctggcatggtggcgcatgcctgtaatcccagctactcgggaggctgaggcaggagaattgcttgaaaccgagagatggaggttgcagtaagctgagatcactgcactccagcctgggtgacagaataagacgaaagagagaaagagagagggaaagaaagaaagagagagagagagagagagaaagaaagaaagaaagaaagaaagaaagaaagaaagaaagaaagaaagaaagaagaaagcaagaaggaaggaaggaaggaaagaaagcagcagaaaaagaggaaggaagggaggaaggaaagaaggaaggaaggaagggagggagggagggaaggaaggaaggaaggaaggaaggaaagagagagagagaaagaaaatagacacacacacaactccacaaaacccacaattcagacacacagctcacacacaggtctccagcatagacatatttatacatccgtttactcaaacactcacaatacaatcacataaaacaggcagacagttcacatgccaacacactcttgcacagacacgcaaacagaagcatggaatttgtacagagcacgctcacagtgtctgatccataactcagacacggagtcacgcccacaaaggcacagtagaggcagagttcacacacaaacagacccgcggggacccacgacacagccctctgacacgaggacgccaggccagggcagcgtgggaatgaggctgcaaggagggagtgaggtggagaggatgactcaggaggcctctctgggggaggaggagggaagggggaggagggcaggcatccagcgcatgtggttcctattaggggcctgggaattgaggcatgagctggcgggacaaggagacccaggaacgcttcccagccttaccaaagcaggaaggagcagggccctgatctaaggccatgcggccggaacttggctcagaaccacagccgttctaaggcagagtggtctgccccaagccaggcccagcagggggctcatttcaacccctgcgatagtcctggagaagatttctttttattttttcttctttctttctttcttttttttttttttctgagacagagtttcgctcttgttgcccaggctgcagtgcaatggcgcgatctcagctcactggaacctccacctcccaggttcaagcgattctcctgcctcagctacccgagtagctgggattacaggctcctgccacatgcctggctaatttttgtatttttagtagagacagggtttcaccatgttggtcaggctggtcttcaactcctgacctcaggtgatacgcctgcctcggcctcccaaagtgctggaattacaggcatgagccaccaagctgggcccctttctttctttttttgagacagggcctcactctgtcacccaggctggagtgtggtagcacaatcacagctcattgtagcctcgacctccccaggctcaggtgatcctcctacctcagcctcccaggtagctggtactacaggtgcacaccgccaccatgcccagctaattgtattttttatagagatggggtttcaccatgttgcccaggctgttctggtcttgaactcctgggctcaagtgatcaactcgccttggtctcccaaagggttgggattacaggcatgagccacccggcctggacttttttcttttttttttttttttgagacagggtcttgctctgtcgcccaggctggagtacagtggtgcaatcatggctcactgcagcctcgacatcctggcctcaggcaatcctccttggagggtttcgtaggggaggaaagtgacattcagaaaggtgaagcaacttgcctgaggtcacacagcaaggaggtagaggagctaggattcaagcccttgtctctgtgcagcctcctctccccaccttgtagtagaggccaggacccctccatttaagctacaagcagagatcaagaactgacacctggaccaggctgcactggatttgtggctctgaaacagccagctctggccaggcgcggtggctcttgcaagtaatcccagcactttgggaggccaaggcagatggatcacttgaggccaggaatttgagaccagcctgaccaatatgatgaaaccctgtctttactaaaaataccaaaaattagtcaagcgtggtggtgtgtgcctgtagtcccagctactggggagactgaggcaggagaatcacttgaatccaggaggcggaggttggtgggccgagatcacgctactgcactccagcctggggagcagagtgaggctctgtctcaaaaaaaaaaagaaaaaaaaagggaaagaaaaagccagccccatcctcaaataacttagagtcaagagcgtgctgtgtgcacatgtgggcaaggttctctgggcgtgtatgggaggccctgacgtagcctgggttgtttgccatgaggggcggatgctggagatgaaacctgaaggatgcagaggagctagcagggctcggtgggcagcaagaagaccctggggctgcaaggttcagagagttaggtcacctggtgagggacagtgacaggggaagcccaagattctaggtcagaggacttgggctttatcttagggttaacagggaagcctcagaagaatggtgagaggaaagggacagggtgaagtctgagtgaccagcacgaagtccacacccaggacagctgaacatgtgcctcccccataacccagaatttctattcttagcaatctatacaccctagagacacttatctatgtgcacaaaagacacacgctgtggccgggtgcagtggctcatgcctgcaatcccagcactttgggaggccaaggcgggaggatgggttgagcccaagagttccagaccagcctgggcaacagggcaagacctcctctctataaaataataataataataataataataataataataataataataaaactacctggtcatggtgatttgcgccttctatttgggaggatgaggtgggagaatcacttgagcccaggagttgaaggctgcagtgagctatcattgcaccgctgcaccccagcctgggcaagagcaagaccctgtctcttaaaaaaaaaaaagacacatggctgggccgggtgcagtggcccatgcctgtaaccccagcactttgggaggccaaggtgggtggatcacaaggtcaggagtttgagaccagcctggccaacatggtgaaacccccgtctctactaaaaatacaaaaattagcagggcgtggtggtgcgcacctgtagtcctagctactcaggaggctgaggcaggagaatcgcttgaacccgcaaggcggaggttgcagtgagccgagatcaggccactgcattccagcctgggtgacagacggacaatctgtcccaaaaaaaaaaaaaaaagacacatggccaggcacagtggctcttgcctgtaatcccagcactttgggaggccaaggtgggtggatcacgaggtcaggagatcgataccatcctggctaacacggtgaaaccccatctctactaaaaatagaaaaaattagctgggcatggtggcgggcgcctgtagtcccagctactcaggaggctgaggcaagagaatggcgtgaacccgggaggcggagcttgcagtcagccgagatagcgccactgcactccagcctgggtgaaagagcgagactctgtctaaaaaaaaaaaaaaaaaaaaaaagacgcatgccagaatgtttaaacagaaacaaaatgggaaaaacctaagagttcatgcatagaatgagtaactatgcagaggtaaggtcacacgttaccactgcactttagcatgggcaagagaacaataccctgtctcagagagagagggagagagagagagagagagagagagagagagagagagatacttgtatctacaaggacaggcaaaacctccagttgagctaacaaagcaagttgcaaaagaacatgttcaaccttgaaccagttagagatcatttaaaaatctgccaaatcatgtgtgtcatccatggatacagcagtccatatgcagtacatttggaaaagcattctgggaacagccattcccacactcagaggggtgggataatggggaaagagtgtttcatggggacagtagttcagtctgggaagatgagaacattctggagatgagtggtgatgatggttgcacagtaatgcgatcgtactcaagccactggactatacacttgaaactagttacaatggaaaacgttatgttatatacatatatatatatatttttatttatttatttatttatttatttgagacgttgtctgcctttgtcaccaggctggagtgtagtggcaccatctcagctcactacaacctccgcctcccgggttcaagcaattcttctgcctcagcctcctgagtagctgggactacaggtgcacaccaccacacccacctaatttttgtttttttagtagagacggggtttcaccgtgttggccaggatggtctcaatctcttgacctcatgatctgtccacctcggcctcccaacgtgttgggcatgagccaccgcgcccagccctatgttatgcatattttacatacacatttggatacagttggtgagggaaagaaagagatgcagtcggataaatgtatacaaggggcatcaattatgtgcaaagcgttatttctcaggtgggtgtgtgagtaggtgagagttcatgataagagttctctctattattttctatttatgtattaattaattaacttttttttgagacggagtctcactctgtcacccagcgtggagtgcattggcatgatctcagctcactgcagcctccgcctcctgggttcaagcgattctcctgcctcagcctcctgagtagctgggattgcaggtgcacaccaccatgcccaactaatttttgtatttttagtagagacggggtttcaccatgttggccaagctggtctcgaactcctgacctcagatgatctggcctccttgacttcccaaagtgctgggattacaggcgtgagccaccatgcctggctggttattataaatagtgctgctatgcacatgggtgtacaaatatgtctttgagctttcgctctcaattcttttgctatatacccagaagtgggattgctctgcctggtacatttcttgttaaaattttgttttcattgaggcatatattatacacaataaaattcactaatctctatttttttttttttttttttagacagggtctcattctatcatccaggctggaacgcagtggcccagtcatggctcactgcagccttgacctcctgggctcaagtgatactgttgcctcagccgccctagaagctgggactacaggcacatgccattacacctggctaaagttttaagtttttgtagaaacagggtctcactatgttgccagggctaatcttgaactcctggcctcaagcgatcctcccaccttggcctcccaaagcgctaggattacaaacttgagccaccacccctggactcccctagcttttcttcatagcaccacttgatattatatatatacatatatatacacacatatatgtgtgtgtatatatacatatatgtgtgtgtgtgtgtgtgtatatgtgtgtgtgtgtatgtgtgtgtgtgtatatatatatgtatatatttgcttactgcctgtcaaccatcctaaagtgttaactccagcagggcaaggatctttgtttgtttcatggctgtctccccagagcctacgccattgcactctagtgcctggagcatagtaggtgctgaacaaatatttgttgaatgttatatgtgctgggatggggcctctgatatgtctacaagccagttttttggggtttttgttgtcgttgttgtcgtttttgagatggagtctcgctctgttgcccaggctggagtgtagtggtgcgacctcggctcactgcaacctccacctcccgggttcaaacgattctcctgcctcagcctcccgagtagctgggattacaggtgtgcaccaccatgcctcactaatttttgtatttttagtagagatggggtttcagcatgtccaccaggctggtcttgaactcctgacctcaggtgatctgccggcctcagcctcccaaagtgctgggattacaggcatgaaccaccatgactggcctacaagccagtttaaccaggctcttgtatgtagcttcatgtgtcaatggcatgtcttcatgtgaggctgcagttttccaggtctaacatgtgccagccaggtctcatgatgcagtagttttgtgtatgacaatgacagtctctctctccaggtgtggctctgtctctgcaaatggatttctgaacaccaatgtgtgtgtgtgaagggagctctgggtgtgtgttgtaaaccaataagtaggccgggtgcggtggctcacgcctgtaatcccagcactttgcaaggccgaggagggcggatccgaggtcaggagatagagaccgtcctggctaacacagtgaaactctgtctctactaaaaatacaaaaaattggcagggcgcggtggcgagcacctgtagtcccagctactcaggaggctgaggcaggaaaatggcgtgaacacgggaggcggagcttgcagtgagtcgagatggcaccgctgcactccagcctgggcgacagagcgagactctgtctcaataaataaataaataaataaataaataaataaataaaccaataagtaacagaggcagatctcaatcaatttagaggttgattttgccaaggttaaggacactcctgggaaaaagaaacacaagttacagtaggatctgccgcctgtgctttgtccaaagagagtttttaggacttcactatttaaaggggactgggtgtagtggttcatgcctgcaatcccagtgctctaggaggccgaagtgggaggatcacttgagcccgggagttcgaggctgcagtgagctgtgatggcaccattgcacttcagcctgggcaacacaacgagaccctatctccaaaaagaaattcttttaagaaaaaaaattagagtgggcacaatggctcatacctgtaatcccacactttgggaggtcaaggcgggcagatcacttgaggccaggagttcaagaccagcctggccaacatggtgaaaccccatctctactaaaaatacaaaaaattagccgaatgtggcagcatgtgcctgtaatcccagctacttgggaggctcaggtatgagaatcgcttgaactcgagaggcagaggttgcaatgaaccgagatcacatcattgcactccagcctgggtgacaaagcaagactccatctcaaagaagagaaaaaaattaaaacaaatttaaggggaaaaagcaaaaaggaggggaaggaggaagggaaaaataggggagagagtaggcaatgaggcaagtggtttcattcatgtgaggctttgattaccgcttagtgaatctgcattttacatgtgaaaagagaggggtagattatgcaatcggctccagctcagtaaatctacattttacgtaagacagagtaagcaagtgaaattacagctatctccttcggaacaaaaggaaagcagttttcgcctgactcagttcccaagcttcacttttcccttttgccacagttgagtttggagccccaagttgcaattttcctttcacagctgggagtgtgtgactgtgtgtgtgccctgctattggtgccagtgtgtctgaacctggctgaggatgtgggtgtgtgtacgggagtttggaacatgacctgcagccgtggcaggggtgacaagagaaaagcctgactttgagggtccttggttctgatatataattgtgtgtgagtgtccccatcaaagttgtggccgggcacggtggctcatgcctgtaatcccagcactttgagaggtcaaggcaggcggatcgcctgaggtcaggagtttgagactagcctcgccaacattgccaaaccccgtctctaataaaaatttaaaaaaaaaaaaaaaaaagctaggaatggtggcacacacctgtagtcccagctactcaggaggctgagtcagaggaattgcttgaacctgggaggcggaggttgcagtgagccaagattgtgccactgccactgcattccagcctgggcaacagggcaagacttcatctcaaacaaaacaaaacgaagttatgggtatgcgtgtgtaaaattccctgctaggcccggcaccctggctaacacctgtcatcccagcactttgagaggctgaggcaggagaaccgcttgagctcaggagttccagaccagcctgggcaacatagtgagcccttgtctctacaaaagatttaaaaattaggtgggtgtggtggcacgagcctgtggtcccagctactcaggaggctgagatgtgaggatctcttgagactgggatgttgaggctctactccagcccgggcaacagaacgagaccatctcaaaaacaacaacaacaacaaaagaaatagccgggcatggtggtgcgcacctgtagtcccagctatgagggaggctgaggcaggaggattgcttaaagccaggaatttgaggctgcagtgagctatgatcaagccactgaacttcagcttgggtgacagcacaggaccctgtctctaaaaaaataaattaaaaaccattagtgaggagaggtgggatgcacctgtggtcccagctactctggaggctgaggcaggaggatcacttgagcaggggaggtggaagctacagtgagccatgatcacaccactgcactccagcctggtgacagagcaagaccccaactcctaaacaaataaactcccctaccatatccgccccgcgcctgaccacagccatctctgtataaagccacaggcggcccccactctggccaccccactccacccctggctggaacactgggtgtcagtaattgctcagggagcactagcagtgtgattaattatggctgctaaatatgtaaatcagctgggggttttccgggcagccgcctgggtgctggcactaatgttgaataaacacaaggagcttagcaaggcccagaattcccttctcacacctttgtcaattaacgtttcatttatggggttgggtttctcattcattaacgagctttgggctcattaaagagtcctcattaaactctataaatcgtccctcctttccaaaacgcctgcactgggatgggaatggagttgcaaaaccgagacaggccgacctgcattcaaacgcctggctgtgtactgtgggcagacgcctcccctctctgaacctgtttccttcctgtaaaatgcaagcaaacagacatgggggcatgggggcaagcgccctgtggctcatgcctataatctcaacactttgggaggccaaggcgggaggatcgcctgaggacaggagtttgagaccagcctgggcaacatagcaagaccctttctctacaaaaaaaatttgaaaattagctgagcatggtgaagcgcacctgtagtcccagctactcaggaggtggaggcaagagggttggttgagcccaggtgttggaggctgcagtgagctatgatcgtgtgactgcactccagcctgggcaacagagcaagatcctgtttcaaaaaaataaaaggctggggtcaggagttcaagaccagcctggtcaacatagtgaaagccctgtctctactaaagatgcaaaaattagctgggtgtgatggcacgtgcctgtagtcccagttgctcaggaggctgagacaggagaattgcttgaacccaggaggcaaaggctgcagtgagctgagatcatgctactgtactccagcctggtcaacagagcaagactctgtctcaaaaaataaagaaatacaataaataaaataaaataaaagaaataggccgagcacggtggctcacacctgtaatcccagcactttgggaggctgaggcaagtggatcacctgaggtcaggagttcgagacctgcctgaccaacatggtgaaacccccgtctctactaaaaatacaaaaattagttgggcatggtggcacacgcccataatcccaggtacacgggagcctgaggcaggagaatcgcttgatctcaggaggcagaatttgcagtgagctgagctcacgccattgctctcaagcctgggtgacagagcgaaactccttctcaaaaataaataaataaataaataataataattaaaataaaataaatataaataaaaagaaagggagatattaaagtggactgtgataattaagaaagagaatacatgtaaagtgctgagcccaggggtgtaattttgaaaaacggcaacagccaaaattcccttaagagagagaatggctttttgtttagcaaaatgtttgtgttttttgtttttcgtttttaagagatgggatcttggtatgttgcccatgttgacttgaagtcctgggctcaaactcactccagatctcccaccttaggctcctaaatagcttgagctacaggtgcatgtcaccatgcccagctctgtttagcaaaatctgttgatgatcttcatcactttcttctttttttttttttttttgacggagtctcgctctgtcgcccaggctgcagtgcagtggtgcaatctcagctcactgcaagctccacctcccgggttcacgccattctcctgtctcagcctcccgagtagctgggactacaggcgcccgccaccacgccctgctaatttttcatatttttagtagagacggggtttcactgggttagccaggatggtctcgatctcctgacctcatgatccacccaccttggcctcccaaagtgctgggattacaggcgtgagccaccgcgtctggccgatggtcttcatcactttctagttctagactttggataaattattccacctctctctgttcctcagtttctttatctgcaccacagagataataatagaacatccctcaaaggttgttatgtgggataattaaattaatcgaggtaaaacatttgatgaacagtgtctggcatatgagtaataaatggcaactatgattaagattaatagtgttagttgaggctgggcatggtgtctcacgcctgtaatcccagcactttgggaagctgaggctgaatgatcccttgagcccaggagcttgagaccagcctgggcaacacagtgagaccttgtcttttttttttttttttgagacagagtctcgctctgtcacccaggttggagtgcagtggcacaatctcggctcactgcaacctccacctccctggttcaagcaattctcatagctcagcctccacagcagctgggactacaggcacatgccaccatgcccagctaatttttgtatttttagtagagacggggtttcaccatattggccaggctggtctcaaactcctgacctcatgatccacccgccttggcctcccaaagtgctgggattacaggtgtgagccactgtgcccagccgagaccctgtctctctgtttttttttttttaattatactttaagttctagggtacatgtgcacaacgtgcaggtttgttacataggtatacatgtgccatgttggtgtgctgcacccattaactcatttacattaggtatatctcctaatgctatccctcccccctccccccagaccctgtctctttaaaaaagtttaaaaattggctgggcgcggtggctcatgcctgtaatcccagcatttaggaggccaagatgtgtggatcatgaagtcaggagatcaagaccatcctggacaacatggtgaaaccccgtctctagtaaaatacaaaaaaaaaaattagccaggcatgatggcgcacacctatagtcccagctactagggaggctgaggcagggtagttgcttggaaccaggaggcagaggttgcaacgagccgagatcacgccactgcactccagcctggcgacagagcaagactctgtcaaaaaaaaaaaaaaagtttaaaaattagctgggcgtggtggcacatgaatatagtcccagctacttgagaggctgaggtgggaggatcacttgagtccaggagttggagactgcagtgagctatgattgcaccactgcactccagcctgggcaacagcaagaaaaaaaaatgcttctaaaaaaacatgaatgaacgaatcatcaacctctgggcaccaacagtcttcatggagtcaggactcttagcaacgttgattcaatgaatgaggacaagtattcaggtggccttaaggggctggtggcaggagtagtagggtgagagccttgggtttgagggagaaaactcaccccaacctgaagtttctacccacccaatcccatctgacccaactcaactcacaccatttctccatcactcctaactaaactcaatccaacagtgcccatcaacgatgaatgaattagctgaaggtgggagatgactgaatattacttggcaataaaaaggaatgaagtactgatgcatgctgcaaataaacctggaaaccagccaggcactgtggttaatgtctgtaatctcagcactttgggagatcgaggtgggtgaatcacttgaggccaggggttcgagaccagcctggccgacatggtgaaactccgtttctactaaaaatacaaaaattagccagggatggtggtgcgtgcctgtagtcccagctactcgcgaggctgagaaaggagaattgcttgaaccctggagggggaggttgcagtgagccgagattgtgctactgcactccagcctgggtgacagagcgagactctgcccacaaaacaaaaaactcctggaaaccgttttgctgaaaatgccagatacaaagggccatatatcattatatcatttatttgtatttattccttttttttttttttttttagagacaaggtctcactctgtttcccaggctggagtgcagtggtgagatcacagctcactgcagcctccaactcctggcctccagtgattctcccgcctcagcctcttgggtagctgggactacagatatgcaccactgtacctggctaatgtttttattttcatttttgtagagatggggtcttgctatgttgcctaggctggtctggaactcctggcctcaagcgatcctcctgccttggcctcccaaaatgctggggttgcaggagtgagccacctcacctagcgtgattccatttatatgaaatggatatttctgtccagaataggcaaatccttagagacagaaagcagattcgtggttgcctacagctgggaggttggaaagacatgagtgaccactaatgggtataggatttcttttaattacacagcttaaatgggtgaattatatggtaatgaatggtaatgaattatatggtaatgggtaaatgaattctatctcaataaatcagttaaaaatatacctcaaaccaacatcttactcctaattcaaatcatcccaaaccaaatttttttttttttttgagacaagttcttgctgtggtgtcacccaggctggagcacagtggtgcaatctcagcttactgcaacctccgcctcccaggctcaagtcattctcccacctcagcctcctgagtagctgaaaccacaggcatgctcctccatgcctagctaattaaaaaaaatttttttgtaaagaggccaaacttctggtttaagctgacttgggcctcccagcccaagctgacaattttcaacttttcctctaggagcctgggtgaataaataggcctataatctccagtgagtctcattataattgcattcccaaaagacatacctaattaatacaggtggtgacaggtacctcagatgagacaagagccagatcccaagacagatatgggccacatcagatgaaagagatcaagagctgggtgaggtggctcgtacctgtaatctcagcagctcaggaggctgaggtgggaggattgcttgaggctagtagtttgagacaagcctgggcaacaaagaaagacaccatctgtacacaaacacacacacacacacacacacacaaaacaacccagctgggtgtgatggtgcatgcctgtggtcccaggtactcaggaggctgaagaaggaggatcactcgagtcccagagttggaggctgcagtgagccatgatcatgcccttgcactccagactgggcgacagagtgagacccagtctctaaaaacgagcaaacaagggctgagcgtggtggctcacatctgtaatcccagcactttgggagatcaaggcgggcggatcacctgaagtcaggagttcaagaccagcctggccaacaaggtgaaatcccatctctactaaaattataaaaattagccgggtgtggtggtgcatatctgcaaccccagcttctagggaggctgaggcaggagaattgtttgaacccgggaggcggaggttgcagtgagccaagcttgcaccactgcactccagcctgggcgacagagcaagactgcgtctcaaggataaataaataaaacaaacaaacaaacaaaaaaatttaaaaaagaaatacacagagacagaaacacagttcatcagtttattctcagatttgagatgcaaattatgccctatggcctggcggtggggggccaggcttgggctggaatctctcatcatatcccagccttccctaaggaggaagcagatgaaatctacaacaggggggactttcccttttaatacagacccaggtataaatagggcagcaccattaggatcctgattcacccccccaacatcttggtccccaaaccacctggcatggcaaggtgagcctggggaggtggggggcagggggaggggatttgcagagctgggctgaggcaggaaaagaaacacaacccagtcaagggaagtccctcttccctctgtagtccgacctcagtcctttcaccgtggaagtagaaaggatcaaagggggtgggggtaggggtcccagcctgggatcaggagacatccagtgcttaactctggggaggggtagcaccaaaaggtgtgaagggcagcgacggaggagtgaggaggcaggcattgggggtgggggggcttttgttcatcagctctgagttagaagctcattgcatgggggttcaaggggtggggaggtgaggcttgggtggggagggaggggagaaagagccagactgcagtatgccacctggaatggggtgagaggaggctggacccttgggccagggaaccccagcccccagcaccctggaaaggagaaggaatgactgtccgtgatgagcgaagtcacatcccattggctccatagtcacaggtaacgaaaaatacggtggcttcaaagcctcagcaccaaatgcaccccattctggggctccctcatggtccctcccaccccggacactctcagctgctgaagcagacggggcccagttcaaacccaaacttttggttcgtctggccaaagtcagtggccgccacatcccacaggggcagaaatcccgctcgagaagagctgaattcgaaaagggtcttcgtctgtcctttccggagctgtccccagagaagacagagacggtgagttaccgggaaggtggccgacatcttgcctcccctctctagctggccactgccccaccctcttacccggcagccatcctgggggacgctgacagtggctgctgtcgtctggttgaaagacagctcctctccattggtgccaaggaagcgggcggagtggctgtagtcacccgtggcttcgtccagccaggcagctgcattctggcaggagtaggtgaagttctggcgagctgtggcactcagcagtttcaggaagttcagctgcacgacattcactggggacccgtcggcgtccacgtaggagaactggtgagaggagggcaaggcagaggatgaggggctccatgagcctctttctgcagaagccaccccctggaatctccatccactggcagacaagccaccccccccatgtcaccatctctgaggaggtcccaccagccacctagagatccctggcagaatcccaagagtcacctgaacatccactctgtccacctctccatccagtaggcctccatgcccactccatctgacctcccaaattctgattgcttcatccaccaatccagggttttaacacactcatccccacccagaagacacaactctgcctccactcttgtgagtcgctggatctacagagctcactgtccctgataccagatttctgccctgtccaatatggcagccacatgtctaatagccacgtggcttttgagcacttgaaatgtggctgatttgaaggagggatttttttttactttatttaattttttttccttttttggggggtaagggttgggatcttgctctttcgcgcaagttggggtgcactggcacaatcctggctcattccagcctccatctcctgagctcaagtcatcctcccatctcagcctcccaagtagctgggactataggtgcacaccaccatgcctggctgggactttttttttttttaacttcatttaatttttttttttttttttgagacggagtcttgctctgtcgcccaggctggagtgcagtggcatggtctcagctcactgcaagctccgcctcccgggttcacgcctttctcctgcctcagcctcccaagtaactgggactacgggcgcctgccaccacgcccggctaattttttgtatttttagtagagacggggtttcaccatgttagccaggatggtctcgatctcctgacctcgtgatccgcccaccttggcctcccaaagtgctgggattacaggcgtgagccactgtgcctggccctgaattcttttacttaaaaaaattcacaactaatgactgagcttcaatccagttatcagaaagcttatgcttggaacaacttgagtctgaatctactttttgaactgttgttcaatggttttatgaaatctaaatatagagcaaatattcccaataaaatttagcattcaaattgtgatgtactataaatgtaaaatctccatcagattttgaagagctaatctgaaaaaaatacaaaatatcttaataatgctttttttttttttgagacggaatctcgctctgttgcccaggctggagtgcagtggcacggttttggctcactgcaacctcttcctccagggctcaagtgattttcctgcctcagcctcctgagtagctgggattacaggcacacatcaccatgtctggctaattttttgtatttttagcagagatggggttttacaatgttggccaggctggtcttgaactcctgacctcaggtgatccgcctaccttggcctcccaaagtgctggaattacaggccactgtacccagccatgtggctttttcttcttcaaattcaccagaccctgtcttgactgagcctttgcatatgcctttccctctccctggaacacttgtccttgtccttcctagcttgctaacacagtgcattctttaggcttcagatgagctgtgatctctactaggaagccttctggtctttccaacactgcctctaaatttccaccatgccctgtgcttcccctatcctggcaccatcattctgtatggcaattgactgcctgttacacatctgatgctgctgccaccccacctccagcttgcgatccctaggaaggtagaggaaagcctatcctcttcatctcacctctcagaacccacccctcaaacccccctgctggttcccatcaattttcatgtcactccccatctcggcctcggtgactcaccttcttccctcgacggaatgtgctataccagcctccaggcttttccttggaccaggaggccaatttcacctggaagagaaaagggagggtcactgtagctgacgcccttggtgccatctagatctcatctgcatttccctcctcacacagtaggctgttgtgactatgtcaggatgttctctggcttctgggatggacgagctctgccagtgcacaatgggggaaggaggttcatgcccctgaggcagccctcacccaatgactaatgggagttggtggataaataccccagctccctcacctccaagggggataactctcaggtgcctgtgctacacagtctcccagggctccccagtgggattgagctctgggtctccaatggcaccattttattttaattaattaattaattaatttttgagacaggatctcactctgtcacccaggctgaagtgcagtgacataatcatagttcactgcagcctcaaactcctgggctcaagcaatcctcccactgcagcctcccaagtagctagaactacaggcatgtacccccatgcccagcttttttaaatttttattttttgagacagagtcttgttctgtcacagggtcttggagtgcagtggtgtgatcactggctcactgcagcctcgacttccaaagttcaagcaatcctctgacctcagcctcctaagtagctgggataataggagtgtgccaccatgcctgttttttttgggggggggggcgggtggagggggtctttctatgttgcccaggctggtcttgaactcctgggctcaagcgatcctcccacctcagcctcagcctcccaaagtgctgggattacaggtatgagccactgtgcccagcctcagcctctccctttaggctaagcaggtgagtgaagaggaggtcctcagatgttagtaattgtttagggatcaagtcttgcactccgggcccagtgggaagtccaagcttgtctaaattcccatccactgggcatctgagctcccactaaaccaggagaaaataaaccagttaaaaataacaacatggggccaggcgcggtggctcaaacctgtaatctcagcactttgggaggccgagatgggtggatcactcgaggccatgagtttgagaccagcctggccaacatggtgaaaccccgtctctgctaaaaatacaatacaaaatgagccaggtgtggtgacaggcacctgtaatctcagctactcgggaggctaaggcaggagaattgcttgaactggggaggtggaagttgcagtgaaccaagatcacgccactgcactccagcctgggcaacagagtgagactatgtctcaaaagaacaaaacaatatggggctgggcacagtggctttctcccactgcttaatcccagtgctttaggttacagtgagctatgatgatgccactgcactccagcctgggtgatagagaaagaccctgtctataaaaattagaatagaccgggtgtggtggtttatgcctataatcacaataccttgggaggccaatgcaggaggatctcttgaggccaggagttcaagaccagcctgggcaacatagtgagaccctcatctctataagaaatttaaaaaattagccaggcatggtgatgcacacctgtgtgatgcacagctactcaagaggctgagacaggaggatcattgaacccaggaggttaaggctgcagtgagctgtgatcccaccactgtgctctagcctgggtgacagagtgagaccctgtctgaaaaacagacaaaaataacaataacaataaatattatttcacacttataccggccaggttcttgctaagtgctttacctgcagatagaggtattagcccagcactacatgtagtcagggtttagtaaatgttccctgcaggccaggtgcggtggctcatgcctgtaatcccagcactttgggaggccaaggtgggcagatcacctgaggtcaagaccagcctaaccaacgtagtgaaaccccatctctactaaaaaaaaaaaaaaaaaaaaaaaaaaaaaaaaaaaaaaaaaaaaatcagctgggcatggtggcgcatgcctgtaattacagctcctggggaggctgaggcaggagaaacacttgaacctgggaggcagaggttgcagtgagctgagatcacgccactgcattccaggctgggagacagagacagactctgtctcacacacacacaaaaacaaaacagttcactgatatttgtttttgcatcagtatctgaattgcacagccactctatgaagtagatactttctttttttcttttctttttcttttttttttttttttgagatggagtctcgctctgtcgcccaggctgaagttcagtgacacgatctcggctcactgcaagctccgccttctgggttcacgccatcctcctgcctcagcctcccgagtagctgggactacaggcgcctgccaccatgcctggctaattttttgcatttttttagtagagacagggtttcaccatgttagctaggatggtctcgatctcctgaccttgtgatccacccgcctcggcctcccaaagtgctgggattacaggagtgagccaccgcgcccggccttcttttttttttttctaggcggagtctcactctgtcacccaggctggagtgccatggtgcaatcttggctcattgcaacctccgtctcccaagttcaagtgattctgctgcttcagcccccgagtagctgggattacaggcgcccgccatcacgctcagctgatttttttatttttagtagagacggggtttcaccatgttggtcagccttgtctcgaactcctgacctcaggtgatctgcccccgcttggcctcccaaagtgctgggattacaggcgtgagctaccacatccagcctattgatttcttttggagttttccttgtctgtcttcccatggaaggtatgagttccataaaagcagagatagtttgttttctttcctttcttttttctgagaaggagacttgctctgtctcccaggctggagtgcagtggcacaatctcggctcacactaacctctgcctctagggctcaaaggatcctcccgcctcagtctccagagtagctgggactacaggctcgcaccaccatgcccgccagttttttaattcttgtagaaatggggttttgctatgttgctcaggctggtctcgaactcctgacctcaagcgatcctcccgcctcagcctcccaaaatgctgagattataggcatgtgccaccaggctggcctgattttttttctttttgatcctctgctgtagtcccagctcttgaggcaggacttggcatacagtaagtgctcaataaatgccggttgaaggaaggataacgtcccagacaaggtggttgtgggtgtggggagcaggggacagcacttcctgggggaggcgatgagaggtttgggttactcacgatctcaaacttcttgtcgggatagaggcaggtctctcctcccgccgtgaagttgcaaaaaaccctgaacgagtcccgcgcgcagccctggttggggtcaatccagtattcccctgccgcagagccaggcagggtgggtgagtccggatgggacccgacggaccccaaccccccccacacccccactccgcccatccaagtggcggggggaccggacctcaccatcaggcaggtgcgggtggttgcggtgcagctcgtggcacacgaggcccgggcgctccgcagtgccgggaggacgccgcagctgctccagctccaagctcagcgatgtgagcgaggccagcacctcctccaggccgccctccacgactggaagcgggactgggacgaagcgccggcgcctgcgcagcccatgcagctcggcaggggcaccctgggcgtaggggatggggacggagaagagaggggagatgggggagggagagagagggagaaagagagacaggcagagatgaagaggcagacagacacaaatgagaaagaggagggagagagataaacaaggggcagagatagagaaaggagagataagcagacagggagagacacacaggaaagagagagacagattcagagatggggagaagccaagttgtaagaggacaaaagagaaagcgcaagaatagcagagacagggagagagagcagggagagagacagaagatgaaatagtggcgccagtatagacagagacagataagggagatggacagagacagggagggagagatggggtccaagagacaagacccaggtcagagcccccatgggtgtccccccaagtcccccctcccaggccagaccttccttggggttttacagggaactaccctcttcacctacatcctctgaacacctagtgtgtgcctggcccagtgctgcgcacggaaggaccctctggggacacccagacatagtccttgctctccccccaggttttggtgtccattcccccgccccccggggaactcaccggggggcctggtgggcctgcaggtccagtgtctccacgggggcccatggacccctgtagggagaagtcacttggagaatgaaccctgtctatggagacccttcccaccaacatacacacaaacacacacacacactcacacacacactcacacacacacagtctcacacactcacatacacactcactcacacactcacacacacacatacagccttggggaagagacatgcagttttcagcattaggcatcagacacaaattttcttttcatgttttaatgtctctgaaatcagcttcttaacatctttggcaagtcatagtttacttggcagaactgttttctttcctagcagtttgtaaaataatggtacatcttataattgatggcattttggatctgatgaaatacaaccgtaggtgttgaataaatatttgtcgaacgcacgattgcatgaataaataaataaatgaaggcagagacgtggagggttctggtgcagtgaagggggtggggagctgggatgtgtaagcccacggaagcagggtgtactcaccggagacccttttgagcctttctgtcctagagggccctgtagggtacagacagggagagctgaggtcctggcctggaccaccacagtgacctcatcccacaaaagattccctgcatactcaccgccacacctgggggcccagggtggcccagagagccaatgggaccagggggaccctaggaaaaggacatcgggtcagtattggtggggtacaccctattgccctgacacatcccccagacaagccttcaatcctaccaaaggaagaccccgaaccctagacaagcctccagttcccccacagagagaccccaaaccccagacgcagcctccaacttgccagttcccagatacatccccctattttccccacacacaccctcattaatccagacccacgtttcccagaccccacacccacagtctctcaaccgaccccctccttcaaatgcattcttcccgctcaggtcaggacactcacagggtctcccttgggaccagggggtccctgcacgcctggcaacccctgatctcctttctcaccagcttctcccggggggccaatgagaccgatcaatccaatgtggccctgaaggacaaaagaggcacagacaggggaggacgtgggaggattcagggaggtttttctcctagagccttagggtgatgagtttgggagcagaggatgcaccaatctcccagccccccagccagggagggagggaaagaggggaggagatggggaagagaataatggaatgatgtccttaccttttcccccttggggccagtgtctcccttcagccctgggaggccagagggcccctgggagaagagcaagggtcagttagggattctcaaatgtgaactcgaggtctgtgtgggtggttaggggatggtcaaatgggaaattatgcagatttcaaatgggaattaccagggatgaggtcaagggatggtcagagtaggccaccaaggtgggatgatgagagctaatgaggggttgactggaggatggacaacgtgagtggtcagtggccaaggtcagcgtgggtgatcagtgtagaccattaagatggagagtcagtgcaggcatcaagatgaagggtcagtgtggtcagtgtagaccatcaaggtggagtattagagcagagggttatagagatgggcagtgtagaccatcaaggtggaaggtcagagcagggggttatagagatgggcagtgtagatcatcaaggtggagtgttagagcagagggttatagagatgggcagtgtagaccatcagggtggaaggtcagagcagatggttagtagagacaggcagtatggacactcagatggatggtcagtgagggctagcctgcaccaatgctcactaggtggtcactaggtgcccagagtggtcctcagagccagaacctcaaggatgaacaagtctcttaccagggggccaggagggcccatctgtccaggggctcccaggaggcctggttcaccctgagaatggaacagaacatggggtgggctgcaccctgtcagaacacagtgtggacccccccccgaccatgcaccaggggcagcccctccaaacggtgatgggatcacaagctgggagcagacagagaggagctggatccaccctgtcccacccctgccccgctccactcaccacagggccagggatccctcgaagaccctcaggccccacacgtccagggggccctctagcccccattggacccgtcctccctgggggcccatcaggacctggctccccctgaaatggacacaggcaagggaggggccagagtcagagggttcctgcctcctgacccctgccaagaagcatctgggatcgggagggagtaggtgcacagagtggtcataggtccaccctctcctgatggccccactgttggcctagagtagtgcagggacccttccccttgccagggggactcaccttggcacctttctccccttctctgccttctcgacccatgtggcctgaaggacccttggaagggaaagacagtgaggggggtctaggggctgactgagggtcagaggggtgagtggggtctgggtgactggggggttatggatgagtggggtctgtaaggtgagtggggtctgtggggtgaatgaggtctgggtgagtgggggctgtgggtgagtgggggctgtggctgagtggaggctgtgggtgagtggaggctgtgggtgagtggaggctgtgggtgagtggggtctgtggggtgagtggggtctgtgggtgagtggggtctgtgggtgagtgggggctgtgggtgagtgggggctgtggggtgagtggggtctttggggtgaggtggggtgtgtggatgagtggggtctgtggttgactgaggtctgtggggtgagtggaatctgtgggtgagtggggtctgtgggtgagtgtgttctgtggctgagtggggtctgtggggtaagcgggggctgtggggtgagtggggtctgtggggtgagtgggggctgtaaggtgagtggggtctgtgggtgagtggggtctgtgggtgtgtggggtctgtggggtgagtgggggctgtggagtgagtggggtctgtgggtgtgtggggtctgtggggtgagttgagggctgtgggatgagtgaggtctgtaaggtgagtgggggctgtagataagctgaggacccaggaggtggcttatcacttaccctcttgccggggggcccgggggcgccgggctccccagaagctccaggcggaccctggaggagacaaggacaccagctgtggtctcagctaacattgtttgagcctgactgttttaggacgccttggaccagaggacacccttccccaagcctcaccccagcaccgggtactcccacctcccacctactccctcaagctgctcacattcctgggggtccccagagaggtgaagcgggagcatctgcaggggccttgggtaccccactagcccactcccctgcccccccaattcactcactcattagctccccaacccccgcctcagcaccacaccctctgttttcccactcaccggtcccccaacatcaccagggtctcccttctcccctggggaaccatctatgccctgcatggggggaagacagagttgggaggggtgatgagggtacgtgagaatttgggatggggctgggaggcaaaagaacgtttttggttccactgtcagtgcccaggtctgtgggggtagggagatggggacagaattaggaaatatgccaggattggggagggggtcacactcactgaaactccagggtctcctgggggccctagatctccgggcagccccgtggggccctggaacacagaatgattaataatcacatctctgaattgtggagcaatcatgcatttatggaacagatcaactgtatccaggaacagtttggtttctggggacacattagtgaacaaaacataaaatccctggcttggtagagcgaacattctcgtgtttcatgggtgcagacgctgagctaagaatgccgcacgcatggtctcactgcagcgtcctcacagcctctcagctcgggactcacagagaaaactggccattcatttgtctattcattcattgattcgtctattcattcattcactcattcattcattcattcatccatccatccattcattcatacactcagagaagggacacgccaaacaatgccattcaagtcgaggtcccacagatgctaaagccccttcctgacctccacccgccccaacctctactgtggtgacagaagggcctcaaccttcacctcaaagccaaatcccacatccaccccaaatctgacccaattcaaccttaatctttgcaacagtgttagaatgatctgccgtgaaatcaactttcttgccattcaatgatgtataaccactgcacgtttatgtttcattcacacatttactcactaattcaagtgttagaatgatctgccatgaaatcaactttcttgccattcaatgatgtataaccactgcacgtttatgtttcattcacacatttactcactaattcactcatccatccatccattcgtttattcactcatctcttcagtcattttgttcacttgcgcctctgtccattcattcatgcatccattcactcattcactcactcatttgtccattcggccactcattcattcatccattcattcatattcatgcatccattaatttacttattcatccattaatttactcattcatccattcattcactcatttattcgtgcacatttattcattcacatattcatatatccactgatttattcatttttccattaattcactcattcacccattcattccctcgttcatccattcattcactcgttcatccattcactcactcgttcatccattcactcatttattcatccatttattcattcacgtattcatccatccactgagttattcacttgtccattcattaattcactcattcatacattcatccactcattcattaatccatccatccacccattcattcattcatccgtgttctgggggttactcatgagatcagtaaattagaggatgcaatccctggctagaagtctgggagagttttggccgagcgcggtggctcatgcctgtaatcccagcactttgggaggctgaggcatgctgatcacgaggtcaggagatcgagaccatcctggccaacatagtgaacacccatctctactaaaaatacaaaaattagctgggtgtggtggcgcgtgcctgtagtcctggctacttgggaggctgaggcagaagaatcgcttgaacccggaagacggaggttgcagtgagctgagatcgtgccactgcactccagcctggtgacagagcaagactccatctcaaaaaaaaaaaaaagtttgggagagcttcaagtacattcaagtgccccctcccatgtctgcccccacttccccccaggactcaccacgctccctttggctccatcctctccagggggacctttcttgcctgggggtccagcagctccagatgggcctgagtcccccttttcaccaatgtctcccttgggcccctttacagaaagaggtcagaggtcagagtggcctggactctccagggatcaaggattagcatacttggattcaggcattggggtggtctgggacttttctggggtcagggttcagagtagcctaggttgtccaagggtcaaaggtcagaaggagctaggacttaagacagtgaaaggtctggatggtctaggtgcccattggtcatgtgcaaggttggcctagcccatgtgctgcccttgagtgaattagaagaggggccccatctgggcaactcatcctcaggtcaggactcatgactcagatttgagccctcacctatcccctgggtcatgtagtcttgtgtagtgtgcaacctgcagaactgtacatagcagccctatctgagaacttccaggtgtccttcctcaaggtaatcagggacggccacaggacaggggtgagtggatgatcttgcactgtccagaggtcaaagtggcccaagatgcccaggggtcaggggttccctgagttgggtgcagggaccacatcacacagtcactcaccgggatgcctggggctcctggaggccctgggtctccagcgtcccctcgctcaccctgcaggaggcaaagtgagagtggggagaggtcccatcctagcagacagggaggggctccccagaatgtccctgcccaataggactagatttatctcttccccccgtgcagcccctgccttccctcactcaccttctcacccacggcgcctggctgaccaactcctccaggcagccctggagtgccctggagagacagcaaggggtaagagtgggactgtggaatcccaacatcctcttcttaggaaatggttgtccccatctctgagccttcctggccccccaagagttctcacctctgatccagtggggccttggggaccccgaggacctggagctccatggggaccctgtggaaggtcagaattagtacccagtgaccccaggcccctctccccaaaaggccacattgaccacagataccactgtcaatgctggtgaccctcagggcccttaaaatgacaatgtccctcaaatgaatctaatgcctgccgccaacctataaccccaccatcctccccctcccaccttcctctgggagtgcataccatggacccgacgtctccgacctcccctttctctcccggagggcctggcagcccctgtggaacaaagaagcaagattggggcaccaggtagggagaatcagaagtgccacccccaaacccagacacccacctgcagtccaggagggccaatcacccccacaaagcctctgactccgtcatctcctttctgcccaaagaggcctgggggtccccggcgcccctgagccccgtctgctccctggaagaacacaaacaggggcacatttaaggtctgggtcagtgattagggcagagtgaggctcaagggtcaagactgaggttaagggttggagtcagggttcagattaagtttagagagggtcagtgttgagttggagttggggtctaggttaaggaacagggcttgggaatgaagtcaagggttgagtcaaagtgttaaacagtgagtcggatttgcagttgaggttcagttcttgggcagggttcaactggggttgagatggaatttagggttgggtttgaggttgggcccagggtcatattcaaagtttgagttcaggtctggggtcagcattggaagagttgggtcagagttggggttaaggatagggccgtatgttcctattgtatggtaataaacaaaaaaggacaggtctgggtcagggcttggttaagagatttgaagataaggcttttgtttgtttgtttgtttttgtttgtttgtttttgttttttgttttgttttgagaaggagtctcactctgtcacccaggctggagtgcagtggcgcaatctctgctcactgcaacctctgcctccctggttcaagcaattctcctgcttcagtctcctgaatagctgggattacaagtgtgtgccactgtgcctggctttttttttttttttttcttttccctcttttgagacggagtctccctctatcgcacaggctggagtgcagtggtgctatcttggctcactgcaacctctgcctcctgggttcaagcaattctcctggcacagcctcccaagtagctgggattacaggggcccgccaccatgcccagcaaattttttttttgtatttttagtagagatggggtttcaccattttggccaggctgatattgaactcctgacctcaggtgatccacccgccttggcctcccaaagtactaggattacaggcatgagccaccgcacctggctggagataaggtttgagtagaactgaggttaaggtcatgagtagagttgagactggggctgaagtgggggttcagagctgggtttaggttggaatttagtctgattttaaggttgagtgtatattggacatcgatatagaggggcagatcaaagttgagcatgaggttgagattgaaccagattctggggttgagtccatattggatgttggcattgaggggaagacatggttggagttgagattgagccaaattctgggggtgagttcatattggattttggtattgagggaaagacatggttgggttgggactgggcaggattctggagttgagttcacattgggtgctggtattgagggggaacacatggttgggttgggattgaatcagattctggggttgagttcacattgggtgtcagcattgaggggaagacatggttggattgggattgagacaaattctagggttgagttcatattgggtgtcggtattgagggaaatacatggttgggttgggattgggccagattctggggttgagttcccattgggtgttggcattgaggggaagacacggttgggtcgggattgaatcagattctgggggtgagttcatattgggtgtcggtattgaggggaagacatggttgggttgggattgaatcagattctggggttgagttcacattgggtgtcagcattgaggggaagacatggttcgactgggattgagccaaattctggggttgagttcacattgggtgttggcattgaggggaagacatagttgggttgagattgggccaaattctggggttgagttcacattggatgttggtattgagaagaagacatgattgggttggggttgactccgaatttgggattgggttcatactgggtgtttgtactgaggggaagacatggttgggttgggattgaatcagattctgagggtgagttcatattgagtgtcggtattgaggggacaacatggttgggttgggattgactccgattcttggattgagttcacattgggtgtcagtactgagggaagatcagggttgggtttgaggtttggattaagtcagtgtgcttccactgtcgtttgctcccactatccctcccttcaaggacccagagaaggactgaaaagatgggggcactcaccgggggacctgggtgtcctgcaggaccccgtatccctggttgtccaggtgggccctgggagaacaggaaacagaatcaaaaattccctcaggtttaagattagagagggcactggagctatcaatcactgcctcccacaccccctttatgagaacaacttcccctaccaggcagcaacagctacatccccccaaatcctgtcttctcagccaccaacagatgggatcagacagacgtctgtcctaagcccagccctggccacaagttccaccaagacccagggacgaagctggctcaatgatgcaagccactggagctgacattcggggtggggggaagttgggtatcagatgcttcagtgcctgccacgcagagtcacaggcagagggaaggatgtgtcactaacaatggagaaggttacccgcaccccagtgcctttccagttctttgggagccccagctgtccctatcctgtctgcagttgggttctgtggacccatcgctccaggcagctcaagtaccttctgttgcatgtaattgtcaagatggtacccgagaaggcagaaaactccatggcctctcctaccccatggagaatgatctctacatccctggcctcctctttcttccgctacccaccccaccctgccccactggggaccttcactcaccgcgtctcctttatcgcctttactccccttgtgtccgggggcacccacatccccctgcagaggaaatgggatgaaggacccagcttccattcacccccatcctcccctggacccttcctctctgtgaacccctcaccttgtccccttcctcgccagaaggcccagcagctccagggggtcccagaggccccaggggccctgggatcccatctttgccagtggggccaggggggccacgttctccctgttgtggggaatggaaagggggatgtcagggcaggaatgtcctgcaggagccatgtcctgggatgtggcagggccagaccctgaggaggccctaggaatgggatgggcaagtcacttacccgggaccccttcttgcctgcagggccaacggggccttcgctgccactttggccaggaagtccaatgcctcctgctgggcccaaaggaccgcgctcaccaggggagccctgagaacaggggtgatgaatcaggtataataccagtagtagctgtcctttatggagggtttttaagccaccaggcactgagttctgaggttaccaggattgtatctaacctgttcccctcctgcagcagccagagggtgcctgtgagcacctgaggggcagggcatattcttctcctgctcaagaacactccatggctcccatctcacttagaacaaaagccatagtcctcctggcagcctatacatatatatatatatatatatatatatatatatatatatttgtagagacaggacctggctatgttgcccaggctggtctcaaactcctgggctcaagcgattctccagcctcagcctcccaaagagctgggattataggcatgagcaactacacctggcccaagaaaaggggtttttatatgttgatggccaatgcacaggtaagtatttactggataaatgatctcaatgaggtttgtgatcatacatgagataaggcttcccatcatggctattttacagacaaggaaactgaggcttgccaaggaatacaacggcccagccagtgagcaacagaactgaccttggctcattgcaacctccacctcccaggttcaagcgattctcctgcctcagcctctagagtagctgggattacaggcatctgcctccatgcctggctaatttttgtatttttagtagagacggggttccaccatgttggccaggctgatcttgaactcctgacctcaagtgatctgcctgcctcagcctccatcatgggttttatcatgacaatgtcaagcttccaagacaccttgagtcccctccaccctgcccccacccagcacatggggttatacttacattggcccccacgggccctggggggcccttatcaccctttaagccagtaggtccctgaaggaggagataattcacagttaagagactcccaaaggtgtccccaggtcctgtcttcctctgtggggagctcacagtccccacctctctcctgggactggacactgagctttgaggggtctgccttccccagttccctccaccattttttttgctttcatcatttcccgcaccccaaatgctattccccatccctcccctgacccccccatcctttccttctctaagggacatgcaggagggtctccaaagatactcaccgggtccccagggccccctttggggccgggaaagcccctgagtccagctggcccttctttcccaaggggtcctggtggtcccagttccccctacaggagtgcaaaggagggaagtcaagctccagggaggggatgtctccctccaatctgtgactcagggccccctcccccatgagactgattctgagtccttggttgatcttggatgttcaaccaagatctccagtggacagtgtctcaccttggccccctctctgccttccaggccaggaagaccttgttcaccaggaggtccaggggggcctggaggccccctttcacctagaggtcccacttctcctgtctttccctggtgaggaagaaggctcctgttgagtgggggtggcctaggggagtcgctcaggagtccagctttcccctaaatatcccccaactggtacaaaacaagggaggtttatggagtccactctgacctgagggcctaagacaccagctggtccaggcgggcctgtctgaccttggaagccctagagagaaaaattaaatgtgggggcggtgttacatggggaagggatggaggagcaggagacagggaaggcctgataggatcaggaatctggccggtccggtggctcacgcctgtaatcccagcactttgggaggcagaggcaggtgggtcacttgaagccaggagtttgagagcagcctggtcaacatgatgaagccccgtctctactaaaaatacaaaaattagccgggcgtggtggcacgcgcctgtagtgccactcgggaggctgaggcaggagaattgcttgaacctgggaggcaaaggttgcagtgagccgagattgccccactgcactctagcccaggtgacagagtgagactctgtctcaaaaagaaaaaaaaaaaaaaggatcaggaatcaaaggttgaggggttactcaccagttctcctctctgtccagggtgccctggtcgcccatctttaccttggtgaccctgggggatgaggtgggaaaaagttggggcacagatacagggcttcctcccttcccacatcctccacccacccaacccccaatgagggtgacctcactcacaggggggccctttggcccagggaatcctggagggccttgcagaccagggaggccctgaaatggaaacagaaatcatgatctcatcccccctgcctccctgcccactccctgagccccacataatgacaacaggatcgagcacatattgagtgcttactgcatgccaggcatgggcagggcattctccacaagtcagtcattttattcaccactgtagccctttgggttggagactgaggttactcccattttacagaggagaaaactaaggcacagagtggttaagtgacttgcccaaggtcacacagtaggtgagtggcagagccaggacttgaactcatggctctctgacttcacaggctgtgctccttctttttttcttttcttaaagatggagtcttgctctgtcacccaagctggagtgcagtggtgtgattagctcacttcagcttccaactcctgggctcaagcaattctctcatctcagcttccagcataggtgggactacaggcgtgcaccaccacacccaattaagctgtgctcttaccactgcattataatgtctcttcatctcttgggtttgtcctccactcagaatctctctctctcacacacacacacattcacacacacacacacacacacacactcaccttttctccagggatcccaggggctccatcctggcccacatcgccctaggacagagtgaatgagactcaggccccagaacaaactcaactgggaagaatttggagggactggctgagcctggggcatggggggccttgattgcccacccatcccataccttggggcctggttgccctgtggcacccggttgccccctctctccacgggaaccctgaacaaaaaaaaaaggcaaagatcagatatgagggggtgggggagcctgggagatgagaccaagtcttccaggtcccctccccttgtgactccctctcctgcccgaccagggacattgatataacccaaaccctttccctgcccacagatgacctctccactacctttccttcccagccctgtccccaagtcccagcagggtagggggcactgtctattttcttactggtggtccccgctctccttccaggcctggctgccctgtctttccctgaaaatgaattgtaagagagaaagcagaagagagttagggtgcaaaggtatgacgcaaacacaaaaagacacccagtcacagacccagaaagctgtctgccacatatttattcacaagcttttcagtcatacacatacacacaaatacaacttatactcaaaaccacacaaagatctcaaacacacaattacaactatgattgcatctacagagtacaaacgtgcaagcatgtttgcccacaagacatatattgatcacagctgtgcagtatgcatacatgattgcatgtaatcatggcatgcatttggcaatccacagcctgaagatgacacagaactcatcatgcaatacatctcttgcacacatgtatacccactgtaaacacatgaaggcctggattcagctgaggactttgtcttggtaagcacagcagtatacatacactcatgtacgtacatacaatgttcattaacactgttacaatacacacatagcaacacaaatacaatacatgcatgtatacccatcactcagtgtgcacagaaacacacacatgtgtatacacatgtcctttcacgcatatgtacaagcttcttgcacacatttatgcccaccatcatgcaaagtgcacgcagattcatgcccttgttcacccaggcacaggcctgcaggctgcggcattcaaaccctgtctcatcgatattgaaagatacatgaaacacatatacatgtgcttacagtcatattcatgataataccatgtgtaatcacctacatgtgtcatgcattgcatataatagcatgtgtgcacacaaatgttccaggcatagacacaaacacccagggtccacccatcatcagacacaaccacacatgctgttcccctcagacaagttctcccctctcccttacccccggtcatgactcaccgacttccctttctctcctatgggtcccaggggaccgggaaatccaatagatccctgagtggagagaattagaaagaagacatgagggtgaggagtgagtggtgggtggaattggcccctcataccatcctttgaggcatttccaggtcactgattccagaagcttccttggtctctacagccccagcctcctacaaggcagccctcttctctcctctcccctcctctcctcccttctcatttcactgcagccctttgcactggctgctgtctttggctgaaatgcttgtctcctaggcctccacaaagtcagccactcctgaccatttagatctcattcagatgtcacctccttagaatgcctttctaccaccatcctggcttccacattgcccaagtcaccctctgtctgtcacattatgctattttgttttcccaagaacacttgcgttgaaatgacccttattgacttatttattcaatgcctgttttcccccactgtgacatagctcattggtcttattccccactgcctggcacacggtgagtgctttttaatatttgttaactgactccagtccatgctggaggaacccttcctccacctgggggaagacatcacaggctctgatatcctctcccacacctcactgtgcagactgagttcagatcagaaaagacagttgcccaagttacacagtctgtggtggcatcccgcctcaaagcccatttcaggctccctctactctcccttcccatctgggggttccatggtctctatactctttttttgtttgttttatttttaagagacagagtctcactttgtcacccaggctggagtgcagtggtgcaatcatagctcactgcagcttcaaccttttgggctcaagtgatcctcctacctcaacctcctgaatagctgggactacaggttcacgccaccatgtccagctaatttttgaaataaatttttagtagatatggggtctcactatgttgcccaggctggtcttgaactcccggcctctagtgattctcctacctcagcctctgaaagtgctgagattacaggtgtgagccaccaacctggccccaacactcttcaaggatcctgaacacatgcacacaaggactttctaaaatcttagtctatgtcaggtacagtggcttatgcttgtaatcccagcactttgggaggccaaggtaggagaatcacttgaagctgggagtttgagatcagcctgggcagcatagcgagaccctgtctctgtaaaaaatttaaaaattcatcaggtggtgcgcacctgttgttcccagctactcaggaggctgaggcaggaggactgcttgagtccaagaattgggggctgtaataagctatgatcgcactattgcactccagcctgaatgacagagtgacaccctgtctgaaaggaaagcaagcaagcaagcaaaaagaaagaagaaagaaagaaagaaagaaagaaagaaagaaagaaagaaagaaagaaagaaagaaagaaagaaagaaagagaaagagagagagagagaaagaaagaaagaagagagagagagaaagaaagacagacagaaagaaagaaagaaaaaagaagaaagaaagaaggaaagaaagagaaaaaagaaggaaaagaaaagaaaaaagagggggacgcagtgagggagggagggaagaaaggaaggaaggaagaaaggaggaaggaaggaaggagaataaagttgtccatcaaaactaagcttcaaagtttttttctcaatcgttaaaaagaaaaaaaaatctaagttaaaggaaaaggagtcaatgtaaagggaaatcactgaaaaaataaaaaaaaaaaaccactgtcaaatccaacgtaggcaagataactatcagctcaacagcacaaaaatgtgaaactctaggaggattctgcactcaattatcttcccaaatgtctattttttttttcttttgagacagagtctcactctgttgcccagggtggagtaagtggcacgatctcagctcactgcatcctctgcttcccgggctcaagcaattctcctgcctcagcctccatgtacctgggattacaggcacccgccactgcacccagctaattcttgtatttttagtagagatggggttctgccatgttggccaggctggtggtgaactctcgacctcaggtgatccactcgcctcggcctcccaaagtgctgggattacagccatgagccactgcgcccagccccaaatgtctttaggttcctgctctactctagagaaacagaactcatcagtgatataatatgggaatagtttaggcagaaaaatgaatctcatcagtgtcctcacccatcaaaacattggcaaacaaatgttatgttttcatataagtacgtttttgcataagtacatttgactataagttataattaattcaagatatgtaagatgtgtattttatgattctatgattctcccctttaactgactttgttggtgaatgaaacttaatcacaccaaataaaaggatcctacagttttataatcattgtcatcatcagcattatcaacattattataatcaaattgatgaggtggaaattactgggatgtctgtttcaccgcagagaaaacaggctcaagaaactttcccaagatcacatagcgggtaagagggcatttgaccccaagtctgtctgatgtcaaagctcactttttaaaaaaatttttgagacagagtccccctctgtcacccacgctggggtgcagtggctcgatcatagctcactgcaggctcaatctccttgggctcaggtgatcctcccatctcagcctcccaagtagctgggaccacatctggctaatttttttttttttttttttttttttgagatggaatcttgctttgtcaccaggctggagttcagtggtgagatcttggctcactgcaacctctgcctcctggggtcaaacaattctcctgtctcagcctcttgggtagctgggattacaggtgcatgctactatgcccagctaatttttttgtatttttggtagtgacagggttttaccatgttggccaggctggtctcaaactcctgacctcaagtgatccgcctgcctctgcctcccaaagcgttgggattacaggtgtgagccactgcccccggccacatctggctaattttttttttttttttagatggagtttcgttcttgttgcccaggctggagtgcaatggtgcaatctcagctcaccacaacctctgcctcctgggttcaagcgattctcctgcctcagcctcccgagtggctaggatcacaggtatgcaccaccacacccagctaattttgtatttttagtagagatggggtttctccatgttggccaggctggtctctaactcctgacctcaagtgatccgcctgcgtctgccgcccaaagtgttgggattacagccatgagccactgcgcccagccacatctggctaatttttgtatgttttcatagggaccacgttttgccacgttgcccagtctggtctcgaactcctgggctcaagcaatcctctcacctcagcctctcagggtgctgggattatagccaagagccactatgcctggccaaagcccacattttacattctctcagtgacccttggggtgggcagctcatcccccaagaccacagcctggacccccagatgttagtctctgaatcctgcccatatccatctccaccccccacccccagcttcctaccttaggtccagggcgtcctggataacctgggaggcctggcaccccaagcttgccctgcagaaaggttatgggacaaaggtcagaaattgcaacctggaggtcagaggcggaaaggtcaggctggctggggcatggtgaatgggctaatgggatgggagttggggaaacgaggttcaagtccttgctcctgcctgctaggggcatgtccttgggcaggtcattcagccattccaagtctcagttttccttgtctgtaaaatgggatgaaaatgcctattgcatgtggtggttatggatatgaacacataagttgcatgcattaaattgctctgtaatgctgagctgaggaattaaagatgacaaggttggtagcaacctcctgaggtcgaaggtataataaaagggcaaagggcagagggaaaagattggggacaccttgactgtgggaggctagagggtggagagtcatttaccttctccccagctgagcctgggggcccctcctcgccagcctgccccgcctgccccttcggcccctcaggaccatcctctccccggggacctggagctccgggtttcccctggaagaaaaaggagagtatttaatatccatcttttgtccttcctgctctgtctagccccagctcatcccctccctatcttccccgagcccccagacccacaccacccctcatctggagctggtcttacctgatcacctttgagccccacatcgcccttgaagcctgggaagccgtcctctccctgggtgggagagacagaggccagaagtgagggcctcggggaagggacacaaccaggaccccatgattgggactccctctcctctgatgagttccttctctcctcaccttctcgcctttctccccctggaggccccggttgcctgaagtgccctggaaaataaaaaaaaaaagctctcaagcctcttccctgcttaagaagtgacccagactcagtcccctgctctaaagcagccaggatagtcccaagaggaggctaggcagaagctgggaggggcagcttcagaagaaatgatctttccccagaggcccctccctccccactggaggcctctcaaggtcatctgtgcgggggtgtgcagggaaggccaaatttccaagtaagcgattcccatctcctggagacgctttgtccacagttccttctggcaggagaaagaggatgaacattccaggcccggacctcattttaaaggcaaaggaatgttccccattgtgccagctacaaggcgactctgtgcttggcaacaagatgacctctgtgcttggctatggagagagcgcttagttcaagtctggatgctgctcacaccaaactctgaaaactgcacttggctacaacatctctgagctcagcgggctacaatgaaattgcgcttggatacaatacagcccatgtggttagtctccagctacagacaaattcacttgatcacaatgtaactgagcttggctacaagttgttctctagctttggctacaatgtaactagactcaactacaacataggggttggctacaatgtaactagactcaactacaacataggggtcagttaatgtttctaaaggctgggcatggtggcttacacctgtaatcccaacattttgggaggcagaggctggaggattgcttgagcccaggagttccagaccagcctgggcaacacaggaaaacctcatctatacaaaaagtacaaaaaaaaaagaaaaaaggtagccggatgtggtgacgtgcacctatagtcccagctacctgggagggtgaggtgggaggattgattgagcctgggagctctaggctgcagtgagtgaactgtgatggtggtactgcactccagcgtgggtaacagagtgagaccctgtctcaagaataataataataataatcaaatgaaaaaactgccaagcctggtgggatacgcctatagtcctagctattcaggaggctaaagtgaggggattacttgagcacgggagttcaaggctgcagtgagccatcattatgctgctatattccagcctgggcaacagagaagaccctgtctctaaaaaataaaacatttagggccgggtgtggtggctcatgcctgtaatcccagcactttgagaggccgaggcggccggatcacctgaggtcaggcgttcaagaccagcctgaccaacatggagaaatcctgtctctattaaaaatacaaaaattagccagacgtggtggcacatgcctgtaataccactactcgagaggctgaggcgggagaatcgcttgaacctgggaggcagaggttgcggtgagcccaggtggcatcattgcactctagcctgggcaacaagagcagaaccaggtctcaaaaacaaaaacaaaaaaagattaaaaatgtaattatgcttggctacaatgtaactctgagggtgatgcttgccagactctgtgcctgctacagtatagccaattccttgattatagtgtgtctaagcttgtctaatgcacacatgttcaggtaaattacatctgtatttggctacaatgtcactggactcagcttccatatggatatgaactctaatgcccctgcacctctatttagccaggttgcagctcttggcttaacccagcatactgtgcttatgtgattctgagcttgggttagaacacaaccctcgggccaggcacagtggctcatgcctgtaatcccagcactttgggaagccaaggagggtggatcacctgaggtcaggagttcgagaccagcctggccaacatggtgaaaccctgtctctaataaaaatacaaaaattacccaggagtggtggtgcatgcctgcagtcccagctactcaggaagctgaggcagtagaatcgcttgaatccgggaggaggcagaggttgcagtgagtggagatcgctccactgcactccagcctgggcgacaaagcgagactctgtctcaaaaaaaaaaaaaaaaaaaaaaaaagaaagtaaagaaaagaaaaggaaaaaggaaaagagaaaagaaagaaatgtgtttggcctctaatgggcttagctgttctaacaacaaggtgacaaccacactgtaaggctgtccttggctgtgcagctccaaaccccagtcccactacatttggcctggccaactgattcccctctccacacatccagaagtttctgatggagctgcatcgcatgcctgaacccaaagctggtaaatcactcatacctgcaagcgtatcacctaccttcactccccgaggtccaggatagcccggagggcctgccgaccctggtggaccctgggaggaaaataaggtcagtgccattctagacagtcccttccacattctaagagccctcatctctctcctctgtggcccctgactgcaggccctgcctcccgaccctcgtccccaacccagcctaacctcctggtcactcacctgagcccctttctctcccgtggggccctcatgtcctgggtgaccctggggaagaaacattctcagttgtcagagaccaaaacttgccattccaattcccaaggctcccctttctccttcctccttttcccagctcatggttctcaccagagggccatcggatcctgggaggcctggaattcctgggtttccagggggaccctgaaagaagatgaacagcaggggagagacagaggtgctcagagccctggagcaccactaggatctacgcagacatgcagccgcctcaaggttaagaaataagcagacctcactggccaggaaatctatcccagctctgcccaaacttgctgtgtgaccccaggcaagcccatttccctctctgatcctcagaaatccactgcctctgggaaggttgcaaggaagaacataaaaacagtacaagattgatagcacaacagggtaactatagtcaattatatgtcgcccaggttggagtgcagtagcatgatctcagctcactgcaacctcttcccaggttcaagtgattctcctgcctcagcttctccagtagctgggactacagcacccggctaatttttgtaattttattagagatggagtttcactatgctggccaggctggtctcaaactcctgacctcaagtgatccacccacctcggcctcccaaagtgctgagattacaggcgtgagccactgtgcccgccttccctggcagacacacttctgtgtgataatttacttgtacatttaaaaataactaaaagaggccgggcgtggtggctcatacctgtaatcccagcactttagaaggccgaggagggtggatcacctgaggtcaggagttcaagaccagcctggccaacatagtgaaaccccgtttctactgaaaatacaaaaattagctgggcgtagtggtgggcacctgtaatcccagctacctgggaggctgaggtggcagaatcacttgaacccgggaggtggaggttgcagtgagctgagatcatgccattgcactccagcctggacaacaagagtgaaattctgtcaaaaaaaaaaaaaaaactaaaatagtataactggattgtttgtaacacaaagaataaatacttgaggggatggatactacatgacatgattcttatgcgcatgcctgtatcaaaacatctcatgtactccataagtatatacctactatgtacccacaaagataataaataaaattaattttttttttgaggtggagtctcgctctgtcgcccaggctggagtgcagtggcaagatctcggctcactgcaagctccgcctcccaggttcatgccattctcctgactcagcctcccgagtagctgggactacaggcgcgcgccaccacgcccggctaattttttggtatttttagtagagacagggtttcaccatgttagccaggatggtctcgatctcctgacctcgtgatccccccatctcagcctcccaaagtgctaggattacaggtgtgaaccaccgcacctgaccaataaaattaaattaaaacagtgcaagagacatgttgaaatagaagcttcacagccacacccctttctttaaaaatgcccagccgggcatgatggctctcgcctgtaatcccagcattttggggggccaaggcagatgaactgcatgagcccaggagttcaagaccagcctgggcaacacaggcagaccccatctctacaaaaaaagaaaataagaaaagaaaagaaaaattagccaggcacagtggcatgcgctgatagtcccagctactcgggtggatgaggtgggagaaccacctcgcctggggaagtcaaggctgcagtgaggcattattgagccactgcactccagcctgggcgacagagtgagaccctgtccacaccccccaaaaaaagatatgtgcagaaagaagtgtgtctgccagggaaggcggaagcagatgtgccagggaacaaagatgagacccacagggcctgtgcctcttggtaatatcttctgtgacaggcttctgtgggctctctgtatcctgacaatatcccttatgtgagctagccttggtgggtttctgtttcttgcaaccaatccttccccaacaaggacactttgtatctccgggctggcttagggaatgttgcagtctatcactatccagagctaacagaggggtcttggtgggaagattttcctggcaacagagttgaaggaagaagacttgaggaggtcgcggtaggtggagctgtcactcaccttctccccaggagtgccaatgagtccctggggaccggggagtccctggagacagaaaaagaagatgagagaaggcataagaaagaagcggtgagtgtggaggttgggaagcctggtcacggtctaaggtcttaactgaccactcccatgccccattattgggaaagacagttcaaacctgggacccatggtttccctgctgtcccggagggcctggttctcctggaggaccctggggagaaagtggggtttcagtgaagctaagaggggtcatggtgttggggcgttagtgaaattgacttggggggggtcagtcatggaagggaatagggatgtggacaatcggggtcagagtgtcagaagggtcagaggtcaaagggcacagggcacataccacattgcctttggcaccaggagcaccatcaattccagtcacaccctaggggaaaagaggatgtgagaccaagacagagcaacaagctgggagcctgagtctgagacaccgagagatgcaggtggaaaggtgagcagggccgggcactgtggctcatgcttgtaatcccagcattttgggaggctgaggcaggtggatcacctgaggtcgggagtttaagaccagcctggccaacattgtgaaaccccgtctttactaaaaacacaaaaattagccaggcatgtaatctcagctactcaggaggctgaggcaggagaatagcttgaacgtggaaggcggagtttgcagtgagcagagatcgtgccattgcactccagcctgggcaacaagagcaaaactctgtctaaaaaaaaaaagaaagaaagaaatgtgagcaggcagagaagccagcaacagatatggacatgcagaaggcagaaaagcgagaaaaaaaagacagacaggggccaggaacagtggctcaggcctgtaatcccagcactttgggaggaccacttgaggccaggagttcgagaccaacctaactaacatggtgaaaccctgtctctactaaaaatacaaaaattagccaggtgtgctggtgggtccctgtagtcccagctactcaggaggctgaagcatgagaatcacctgaacccaggagccggaggttgcagagagctgagatctcgccaccgcactccagcctgggcgacagagcgagaccctaatctcaaaacaaacaaaaagacagacagggatgcagagagccagtgacactcaccgggcgacccgtggggccaggagagcctctggggccaagcagtcctcgtggaccctgcaagggagcaggcgaattatttccacatcacctctgtgtggccatgtgagctctaggggtcctatgagtcctggggccctgggagtcctgactccctcccctgcaccaagcaaggggcccagggatccctgatactcaccggctccccagcctggccagtgggccctggaggtccctctgctccctgtggaaaagcgtcattacttgggaacaggaaggtacaaccctcggagagccacctcccctcatctgggcagccccttccagggggtctcggaattagaccaggatccctgggaacctgcagactaagttcatgggattccattcaggcccctgactccaatcctagacctgcaagtctcacctcctcaccccacaatttgtccctagctctcaagctggccactgagacctccagatcttcctctctgattctcactcaggcttccaaacttactttccaaaccaggccctaactctcttccaaacttaccctctcaccatcctctcctgggggaccgggttgccccacatggccaaagtcaccctggagagggaacagaggggagttcagagtggaagggtgtgggcggagagaccagccccctgggaaggcagatggggtgtgaggagggacacagggatcatgactctgatactgagggagaagttgggggggcttgaatattgggaggagggcttagacttgggggagggacctcacacactcaccctttggcccttctcaccaggcagcccagggaggccatcgaagccacgatcaccctgtccagagacaccagtgagccttgaccccataagcctgacagctcccaccaagtcttatctcagcccccatcacctaccttaggtccagtgtcccctgggaggccccgagctccatctgctccagggcggccctatggagaaagtaagcccaagagtcaaggatgagccttccctgtacccctccaccaaattaggaacccaacttcatcatcaacatcaagattttttttttgacagggtctccttctgtcactcaggttggagtgcagtggcacgttctcagctcactgcaacctcagcctcctgagtagctgggaccacaggtgcatgccaccaggcctggctaattttttatatttttggtagagatggtgggggtttcaccctgttgctcaggctagtctcaaactcctgaatgcaagcgatccacccacctcagcctcccaaactgctgggattacaggcatgagccaccatgccaaggctaagatattattttttttaatttatttatgtattttagagctgaggtcttgctctcttgcccaggctggagtgcagtggcatgatcatggctcaatgcagcttcgaattcctggctcaagcaatcctcccacctcagcctcccaagtagctgggactacaagtgcacaccaccacacctggctaattttttatttgtattttgtgtagagaccgggttttgccatgttgcacaagctggtctcaaactcctgggctcaagccatcctttcacctcagcctcccaaagtgctgggattagagataccagttgctatgccatggctgattttattttattttatttttttgagatggcgtcttgctctgttgcccaggctggagttacatatatgttttacatatatatatatatatatatatatatatatatatatatatatatatatggtcacatgtcactgaacaacagggatacattctgagaaatgcatcagtgggcaattttgtcattgtgtgaacaagatagaatgcacttacacaactctggatggtacaacctaccaaacacccaggctatgcggtataacctagtgctctcagactacaaacctgaacaatgtgcgactgtactgaatatcacaggcaattgtaacactatagtaagtatttgtatgtctaaacacatccaaacatagaaatggtacagtaaaaatacagtattataatctcatgggaccagcatcttatttatttattattattattattattttttgagacacaatctcactctgccacccaagctggtgtgcactggctcactgcaacctctgcttcctggattcaagccattctcatgcctcagcctcccgagtagctgggattacaggcgcacgctgccatgcccggctaatttttgtatttttagtagagacggggtttccccatgttggccaggttgatctcaaactcctgacctcaaatgatccacctgcctcggcctccctaagtgctggtattataggcatgagccactgcgcgcagccaatcatcttataagcatcattatgtggtgcatgactctatctgaagttgacttgtttgtcatttccttccatgtgacaggcctcttttttgccgtgctgtttcttccacttccccatctgttcatctggttctatttcagatctcagggcaagcatcactcctgcaggcaagtccttcctgactctacggcctggccggattcctttgacacacactcagtggagctgccattccctgccttcagcactcttttcccactaacgacaccagcagaccccaaggtcacaaagccaaggctcatgttgggtgttgagggatggataaggggtggtctggggacctagctgtcactcaccatcttgcccactcggccagggggtccatgaggtccctgcaggcctcggggaccctagaagaaagcaaaaaggaggaaggaaaggaaaataagaagaaagagggacttattctattgtattaaaaaaaattagagatggggtcttgctgtattgcccaggccagacacctgggctcaagcaatactccctcctcagcctcccaagtagctgagacaagtgtgtgccactgtacccagcttggaaggacatatttatttattgtatagacagggcctccctatgttgcccagactggtcttgaactcctggcctcaagcaatcctcccacctcggcctcccaaagttctgggattccagatgtgagccaccattctctaggaaagtcatcaattgcaagggtatccccagcccctttggcactttccccatccagcactgtatcttgtggtcctgggggaaggctattcccatcctatcctgccctatctccacaagtctcacctgtggcccttctgctccctcctctcctttcagacctggatgcccggggagacccttgggggaggagagatggaggagtgtgggtagatgattcttcactaatgcatgcaccgccccctccacgcagtcgccttactcaccacagggcctgggcgcccagtgagccccactggaccaggggggcctttcatagagagctggaaagacagaggagtcagagcttggggcctcccacaagacccccaacattccccacagaggcatcttcaggagaaaaataacccccttctcctgcccagcccctccttacgccgaggctctatcactctctggggttcctcccactatgtccacacctcccactcacctgagtctgctgcagaactgcctgagcctgggcctgctggaatgagactggggggcctttaaaggagccgcctgcaaactggaactgggaggaatttagtggtgagggaagcccccaggagaggccccctcctggatcaggactccactccccaaggctgggccactccatctccttcttaccggcatcatgatcacagtgcccggtgggcctcggatcccatcaatgccggggattcctgggaggccagcagggccctgagagagggatgggggaagagaggtggagacagggagagagggagagagagagcgaggacaggggaggcacagaaggatgagtcagaaagagagagagagggagagatggagagagacacagaatcaaagagggatcatggcaaggaaagagagagaagtagagagaagtggaaaggaaaagacagagatggaacagagacaaagagaaggggagagagggatggagaaggatgggggcagatggagagacatacagagacagaaacagagagacagagagagatagacagagacagaaaagccagtgaaagacagacagagatggagaaatagagagagaggcgaacatagagagatggacggagggagagggacagagaccaacagagagagacagaagagagacagagacagagtcacaacaggagaaagacagagataaaagacactcagaaacagagacaggcaaaagaagaaaagcaaagagtaggccccagcaacacaaggtgaaccagagaaatagttcacagatgggagacagagaacagaagaggtcagtgccagccccgggatggtgttcccgagtgccacaccctcatatctatgttcagactgtcacgctcccagccccaaacctcactcctctgagaagtgtacaccccagtgggagtctcttaccggtggaccagggtcgccagggaatcctggggggccgggagggcctgaggggccaaccaccccctgttggggacagagaaacaggagtcacaggaagtgcaaagtttgagctaggctgactttcaacctaccactgactctaacctcaggctgacctccctaccccactacagagccactccaactcccctaatgcaatactgacccccactcacccccaacgctactctcggacccctcttctttttttagagacggtctcactctgtcacccatgctggagtgcagtggcgtgatcatagctcactgcagcctccaactcctaggctcaagcaatcctcccaccttggcctcccaagtagttgggactacagttgggtgccactattttttaaaaaaatatatggctatttttaaagagatggggtcttgctatgttgcccagtctctatattgttcatcctccctattttgactcaccctttaagcctcaaatgtccactaccctccacttggccaggcaacattacaccccaactcctcactccaggggattaaacacccctcagctggaagggaaagactggaagaaggaaacacagccatgacttacttggggtcctggggctcctggaggtccctcaaactgctgcccctgaagggagaagtgagtgtcggtgaccgctgtcatcatgaagcctctcaaccccctcacaatccagacccctcaccttttcaatcactgcgggctctccttttgctcctttctctccagcaccctggggtggggtcaggggagatggagagaaaagagatgtgaacttggacataagcccttcagttatctgatcacacacacttgcacacacacacacacacacacacacggagtccaccctcagagccccttctcctctactgtaaccaatatgcactgagaagctcagccccccgcatccaccgggcaatgccatgccaaggtgaatgaagagcgtgaaatccagagactgctgcccaatactgatcctgcatctgcctcttactaactgagtgatctaactaagttgggaaacttagtcaacccctatggccacttacaggtaaccggtcaacctgtaaagtcagtggatgaatgacgcctgtgtatatatcatgcaaagatgaatgaattaaaacaatgcttggcacacaacaagcactccaggtaacaaggtagcaagggcaagttagttacaactatgtgtctatgcgcctcccctgtggaacacctaggcttttcctttctccctttctttctttccttcttctttttctttcttctttttttttttttaaatggagtcttgctctgtcccccaggctggagtgcagtggtgtgatctcagctcactgcaccttctacctcctgggttctagcgattctcctgcctcagcctccccagtagctgggactacaggtgcccgccaacacgcctggctaatttttgtatttttagtagagaccaggtttcaccatgttggttaggctggtctcgaactcctgacttaggtgatccacccgcctcatcctcccaaagtgctgggattacaggcgtgagccaccatgcttggctccttccttccttcctttctttcttttctttctttctttctttctctttctttttctttctctttctttctctttttctttcttctttcttttttcttttttttcagagtcactctattgcccaggcaggcttttccttttttctctctcttttttccttccttccttccttccttccttccttccttccttctcttgcttgcttgctttgcttggcattttttttttgacacagggtcactctattgcccaggctagaatgcaggggtacaatcatggctcactgcaacctcgatctcctcagactcaggtgatcctccctcctcagcctcctgagtagctgggaccacaggtgcacacagcaccatgcccagctattttttattttatttttttgtagagacagggtcttgctatgttgcccaggctgaactcaaactgggagccactgcacctggccttttttcttttctttttttcttttttcttttttttttttttttgagacagagtctccctctcgcgcccaggctgaagtgcagtggcgtggtctcggcttgctgcaagctccgcctcccgggttcacgccattctgcctcagcctcccgagaagctgggactacaggcgcccgccaccacgcccagctaatttttttgtattttttagtacagacagcgtttcaccatgttagccaggatggtctcaatctcctgacctcgtgatcagccctcctcggcctcccaaagtgctgggattacaggcgtgagccaccgcgcctggcccaagcctcttttcttttctctagagaaaggtcttgctctgccacccgggctgcagtgcagtggtgtgatcatggcttcctgaagcctccacctcctgggctcaagcgatcctcctgcttcagctgggaccagaggcacgaaccaccacgttcgattaattttttgtatattttgtaaagatagggtctcgctatgttacccaggcttgtcccaaactcttgggctcaggtgatcttcccgcctcaacctaccaaattgctgagattataggtgtgagccaccatacctggcctcagttacctcttgatctctaccctcttctcttctccctgcccttaacataaaaaaaaagcctaaaatttgtactgacttaagatggtgcttcggaacaacagtccaccatcttcttggtttgctgtctcttggaataaacctgcttttccttccaccaattctcgtctctcttgttttcctttcaaacatcaagccaccgagcttgggttcggttacatcgaatgcgtatccatctttctccaagaccaaaatggagcatgtcccaaagtggtccacttctctgcgtccctcccatcttcctccaggtcacgtcccgactgcagattgcgggcttccctgctgcccctctggctccccctactgtccatgtgccattcagcagccagagagctcttttttttttttttttttttttttttttttaagagatgggtctcactgttgcccaggctggcctcaaactcctggcctcaagcgatcctcccgcctcagccgcccaaagcattgggattacagccgtgagccactgcccccggcccagggggagcttttaaagctccaagtcagatcatgttccttcacaagtgctcaagtggcatctcctggtgcttggagtaaaagccaagcgcctctctctagtcacagagtcaactattagcacagtgcctgacacaagcaggtgcagaagtcaaaagagagactggcctttcgtggctccaggtagaaatcccttctaagacctcaagatgtgagaaaagtaagtaaataaaataacacaggaacagaagaccatataccacatgttctcacttataagtgggagctaaatgagaacacatggacacatagaggggaacaacagacactgggacctatcggagggtggagggtgggaggagggagaggatcaggaaaaataactaatgggtactaggcttaatacctgagtaatgaaataaataatctgtacaacaaaaccccatgacacaagcttacctatgtaacaagcctgcacttgtacccctgaacttaagataaaagtttttttaaaaaaagaaaaaattaaattaaataatttttttaaattgttcggttttttttttcaagatggagtctcactttgttgcccaggctggagtgcagtggcacgatcttggctcattgcagcctctgcctcccgggttcaagcaattctcctgcctcagccttcccagtggctgggatcacaggcgcgcgccaccgctcccagctaattttttgtatttttagtagacatgggatttcaccacgttggtcaggctagtctcaatctcctgacctcaaatgatctgcccacctaggtctcccaaagtgttcggattacaggcgggagccactgcgccctgcctaaataaataaattttaaaaaaattttaataggaatcccactctcttgcacctaaccccagccacctagaaactcacaggaaagatctggaactgagtccgagatggatattctgctgcccggaagtcagggcccatggtggaatcatctccttcttcatcctccctggctgccttggtctccagggtccccagctcggttccactgtcagggtccaagctcctctgagaacgttaggaaagaccaaagttttccctgacctccttattttctgccacccccgtaacccttggggtctcccctcttccatccccatccaacctctaggatcgtggcattgagtccagtagtcacagtggaggtgacgaccaaaggcgtgggggtcggaggcagatttggagctggagtctctgtcttggggatgtcagtggaggtctggagcagggatggagggagccttgggtctcgggtgagggcaatcaagacaaaagggaggcaccctcccactgtccccaggagctcccagtccggggacagggacagaggaggctccccaaagagcaccagaggccaatggagacaaaagtgtgccagctggaccagggctgccagcagagggagccaccgtggatggaggaggtgctgagtcaggctggccctgaagcccagtggtcaaggtcaaggtccaacattcagggccaggctcccggaagcctagcccacatgtcctctcccaaggcagagttcagcggccagcaggccacagtcagagagggagtggcggctccttctggcctggacagctgcagaggaactgggtcaaggtgggggttgggggggtgtgggaagagggtggtggggtcccaggtgaggggacaaggctgaggaaggggctgaagaggggcccactactcctggtgtttgtattcttggccaagaagatctggaactgagatgtagtgcaaccagtgactcccccaccagccaaagaccccaagcaatgacccccaccaaggaccccccaacccagtgacccaccaagaatgacctacatcaacagaccccagtgattctagaaccagagacccacaaacaacccctcccactcccatcaatggcctcaacctgttactgctccattcagtgattttcctaaccagtgacctcaaccagtgacatctcttggctattagcactaactagtgactctccaactaataacccccatcggtgacccctaatcaattattcctctaaccagtgatgctccaacagtgaatacccataaatgagcgcaacaaaagcgtcctaaccaatgacccccaaatagtaattccacccatcaatgacttcctaactaataattccctcagggactcccaaaccaattaccccatctgcgaccccctgaaaatcactcttccaacttgtggccccaatgagtgaccccactatgacttccagtcagtgaccacccaccaacaaccccccagtcattgaccccaaactagggacatcagtaacaccaataatggtttctatccatgaccttccactgtgatccccagctaggtgcagcccaaacactgacctcaattaatatctccctcaatgattccccactatccagcaatccctatcagggaagccaaataatgcccccaattaatgactctcccaatgaataactgtccccagtgaccccaagcagggaaccccaaacaatgacacactaactaatgaacacgtcattcaacccagccaatgatccccccttaaacagtagccctcatcaagaactcccttaaaatcaggaacttatctgggtctgtcccctccctctagtgccccaggactggagattgagggggtcagagatgggagagatcataagatgggacccacccccaccctgttatcagtcaccctgacagtcatcagtcagctgagagaagtcagagctcatggatccgagaccagagaaaaagatcatagatgagggaccagagattagtagagatgggagactagaagtcaagcaccaagaccagaagtcagacagtcaagaccggaagtcaggtggtcaaaaccggaagtgagaggtctcagggcccttacctggttctctgcggagtcaggaggtggacttgaggtccaaatttccttgttctttttcctgcccttccccttgcgacctcgccctttcttcctcccttttcccttccccttccgccgaggacgaggggtttctggttcaccctggggagcctgggagaagggttccagtcaggtctagagcatcccaccagcagagaccccatcattcaggtcacctggggtgaggctggctcatggcccgtgggtcctcactcagccctgtgacctggagtcaacgttattcatgtaacctggggtcaagggtggctcaggaatatgacttgaggtcaaagtcattcatgcctgggatgtgttggaggtcacgggtcacttaaccccatgtctgggggatgagaattcactctttctagggatctggagccaggaaggacccagcctgtgtcctgagattaggagtcatggagtccctcactcaccactgtggctgccggtgccaggttgtcacagtcggggaggtaccgctcacaagcctggaaggcagcctgaggatctgggcttatcagcagctcctgaatgtctccctgggggttgggggtgtaggagtcaaggagggcagccatacagccataggcttactctgaccccctaacccccagcagtcctgcccacctcctggcaccagggtgcaatgctcccccacccagagcatgctaagtataaggaagagatgaccccatcacagccctagtgatctctctaccccctgtaactaagagaaggaaagatcctatcaggggcacacccgatcccaaccacaagccacatcccacacatctgccccactagaggtgcatcagttccttcaccggttcaagtgattctcagcctcccaagtagctgagattacaggcgtgtgccaccacgcccagttaatttttgaatttttagtaaagacaaggttttgccatgttggccaggctggtcccgaactcctggcctcaagtgatccacccgccttggcctcccaaagtgctgggattacaggtatgagccaccgcgcccggccaagaccataaattgtgacgatgcctacttggcttgttgtgggaagagctggtactggggataaggaggaacatgagatagatcaggtccctggcctcccagaggtgacacacatcacggtcacacacagctaacaaaggtctccacacccagaacacatatcacacaaccacacaacacagctgcctgctggctcccaaagtcataaccgcccccacacaatcacacactatcacagcaaccagcaccatctcaggtcacagtctcagacacacgacaccaccagatctttccacaacaagccaagtaggcgctgtcacaatttatggtcttgtggctctgcaatctcacagtcatgcactgcaacggcacacacaagcatgcactggcacaactggatcttcccacaacaagccaagtaggcatcgtcacaatttatggtcttggccaggcgcggtggctcatacctgtaatcccagcactttgggaggccaaggcgggtggatcacttgaggccaggagttcaggaccagcttggccaacgtgtcaaaaccttgtctctactaaaaattcaaaaattagctgggcgtggtggcacacacctgtaatctcagctacttgggaggctgagaatcgcttgaacccatgaggtggaggttgcagtgagctgagatcaagccactgcactccagcctgggtgacagagcaaggctccatctcaaaaaaaaaaaaaaattattgtcttgtggctctgcaatctcacaatcacaggctgcaacggtgcacgaaagcatgaactcgcttcccttagcttcctggggatagattgaagcttgacatcttccttctttaatatcctctccagattcaggctgtagacaaaacatcccaccctctgcctcagtttcccccatcactgaactcctacctcgaaagtcttttccccaaggtcctgggtccccagcacagtgagtccagctatgctgatgaagcgggggccatggcccaaaacagggggctgagcttcacagtcagctaccagggtcaccatctcaccatctatgctgacggccacacggtgccacctgcaaggggacggcctcagtgcgggtgcttctcaccccaccccttatccacggacccccgcccactctccccatgctcacctgccatctgtgaggttgacctgctgggggagggggcggaaggggtcacctaggagacccagcgctggccccagtgccaggcccaactgccgggcacccctttcatcataaatggacagcaggacagactgattggctggctgtccccgcaaggtgatcagcaaggagaagttctcaggaaagtggccttctgggtgggcagagggaacaaggcagctcagagggcccagcagtgcctccctccggggaggtacccaggcctcctactccaactcacctggaaagagttcccacgtggggatgccgagcgtgctggcctggccaattctgaatgcccggtcaccctctggagtcctctggggacagaagccaggcccctcggggaccccagcctggcctccctgcacacccagggccttcaggacatccacaggatctgcagcagagagaagccgggggtgtcaggcagaggtggggaacagctagaataagcccaggactccaggatagaggctcagggtttttttagggggctcagcctctccctccctcccaccatgtttgtggctcaggaagaaggagccggcctgggcccccagcaccccccgcctcctcaccaccccacagatgttccgacctcagcagcttgttgactctgtttttttttttccccttggtttttggtgagaaaaaaagttgacctagttctgggatgaatcaaaacttcctggcctaagccccagagtggaacggtccccctctccctgctctcccgcgcaggctccctagggctatatcccaggcctggagcccccttgccaggggaaacccacgtggagaggaggggcttccagtgtgttttcttcccccacctcctccctctctctaacctcctcctttgaccaccatcacccacaacctcttccttttgactacagccattttggatctcctccctctgaccatctgcctctgaccatgcccactaacttctttttctggttaccccctctgaccttctgatcttcttctgcctgaccccagcctattccctctgatctcctttttctgtctgatcccaaactcctccttctgaatttcccctttgacctcttccctctgactttcacctctaacctcttccctctgaccctcctctatgaacttcctctctcagactttgccctctgacctcctccctctgaatgtctcctctgatctcctctcctgactttcccctctgacctcctccctctgactttcccctttgacctcttccttctgactttcccctctaacctcctccctctgactctcccctatgacctcctccctctgagcctcccctctgatctctcctctgactttcccctctgacctcctccctctgacattcccctctgacctcctccctctgacattcccttctgatcaactccctctgacctcctccctctgactaccccctgaccttctcccactgcctatcctgatctcctccatctgacccatgacctcctcatttcatctctctgacttcctccttctgaccagctgtctccgataacctccagacctcccctgtctgaccctctccctctttcatcccagctaaggaaaggacttgtctggcccaacagttcctaatctaggccatgctaccagccccaccccagcaggcagcccagccagtgctaagtggaaccacatggcttgggcaggggcgggtgggggcttcccctgggccccgagcccctgtctgattcccccatcccccaaccctcagcaaactgtcccactgaccccctgccccagcctcttggcgggagctggattctccagaatctgccatgacctcacccctgggggcggctctgctgatctcaccacggggagctggggcgggggggctaagacgttggggaggcacgggcttggatgaaggacccccattcccactcttcctaggtcagaaccctcattttccagactcctcggaggcctgtttcagcctctgtttcctcttgcctccaatctccttctctccccatccctgcccgccctctctctgtcccactttctgtgccgggtctttccaggcctccatctgtgtccaagtctctttctctctctctctctctttctctcattctctctctctcttctcaatctctctctctctccacccgccttccccaacccatcaccccagcccccatctctaattgcctgttttgtggctaggctgtcattaagagaaatctgggttgcagtcccctggggctgagatctgggctcccaggctctgctgaccacaagagtcacttccccacggaacaatcatcccagctgccccatctcagcctggggcccagggcaggattgagaccgacgacctcacccagcctggaggctctcccctgacccgcaccctaacctctctgcagaggaaagagggtcttccctcaactaccactcatttacattaagaaagtccttcccggcatccaactcaaagctctcctgcttgaaacttgtgtcccctctggaatgacctttcagaaactgactgccctttcttttcacagctggcattatgacaaaaaggcacacaagctgcattgagtcctgcctacaggggacaaggggtgggggggtctgtcaggggcccagcctgccccctgccactctcccctgtgctggtcagggcccccacggggatgttgggtggggtctgggatgtggagggacagaggcggggactgagtcagggcatggctgggaaccccccaggtgtgcgatgtgtgtgcaaatacgtgtatgtgcatgagattgtacaagcgtgggtgagtctgagtgagacaggcagagaatagctgggcatatgtcgtttctccaggtgtcaatgtgtgcaaatatttggcttctaatggagggattagatacacttgcttgacgtgtggccatgcaacgcttgccgtgagcttgcaggtgtgtctgtgactttaacacctcggacttctgatgggggagtgccgttctgtgtgagagtgtgacccagtgggtgagtgggtgatgggttgtgaatgttgacagtgtttgttcggatgtcaggggcagcatgtgtgagaatttgagcacgtgggagggtcataaaagctgggaccatttggcgggtggctgaagggggttgcctggacacggtgtttcacattcctggagtcccaggggacttatattcagagtggatgcctaagattccatgaccatgtggatgtgtgagcgtgggaatgcggcatagtccaatcagggattaaccatatggacaggcaccttcctggactccaaagtaagaagtgtgctgtggtgtgtgtgtgtgtgtgtgtgtgtgtgtgtgtgtgtgtgtgtgttgggagactgagctcaccttagaaagggatttccaggaggacctagtctagggtctctcagatcagggaagccccatctccaacacttgagaagctacgccatcccctgactcccgaagcgccccccactctgaaccctgaggggcgggacagggcgcccagccagatgcgcgcagctgggcgtgcgtcagcgctgactcacccatccggcggcccccgggaccccttgggggctcctgagaaattcctcgggaaaaacacccaaggctccagcagctggggtggggagggggggagcaacttccactcctgccccgccctgcgccccgccccgtctcgcccctcaccgcggccctccccgaagccctgtccatggtgctgatcgcggctctggggaccgcggggtgggggagggggcaacagggagggaggggaggagatgggcgctcgccaatttggggcagaggaggaaaagggagaatgaggtgaagccatttaaagagacgcaaaggaaactgtgggttcccgaagagcaccccccaatacttgtccccacccaccttcatcctcatgggcaattatttgcacccaaaaatcataactacacccctcatagcggcactcagagacacacaatcacacgcataaccactcacacggttaccctcgaaaatcagcacatagacaagagcacaagtgcatactcacctgtcgcaatacacaccgtcccagcactgccctgtcactcacagtcacactatcaccatcaacctccacacgcaagcacatacgcaacttcactccaaatgcacacacatgctacacacacatacacacatgcacacacctgcacattgcatgcattcccacgcgctcgccagaaaacgcactcacacatccccacccccaccccgagctgtcacacccacaaatcacccagagtcagatactcatgcgcccacatcacaccggggccgcacgcggcgcccacgcccttcccctccacgcccctccacccccctccacccctcgctcttttagagcctctctgagtcgtggaccctgggtcccatctcttccctcccggctcaccggcctgcgtccccggcagaagctgcagcgcggccaggagcaggcagagaccggcccgcggctggcccaggtcccggcggttccccatcccggcggggcccacgggcaaggcggggaaccagtcggggcggctgcggggcgcggcgacttctcgggctcggtgcagtcactcgcggcggccgctcctctcagggtccgcgggaaactgcccgagaccccgccctggcctcgccctgcgctccagcgcctggccaggcggggctttttggagggggagcgctgacagctggactgggaagttgggaaactttgtgctgagggctgattggctggctggggtggagcccagcgccaggagctgggttgttcctgccccaccccactgtggaggagaagggtcactcccacccagccctagagttcgagggttccagtcttaccccaaaccttttccgcctagcagatcccctcaaaggagaccttaacctcattcaagacttcagcctccatccaggccctagaattaggaggaggtgcagctttataccaaatcttttttattttctattatttttacattttattttggagacagggtcttgatctgtcacccaagctggagtgcagtggtgcaatcatagctcactgcagcctccaactcctgcgttcaagccatccacctgcctcagcctcctgagaagcaggtaccacaggcacacactgccacacccagctaattttaaaatatgtatattttgtagagaccgggatcttgctatgctgcccaggccggtcttgaacttctggtctcaagcgatcctccggccttgccctcccaaagcgctggagttacaggcatgagccaccgcccctggcaccaagtcctttctgcctcactcaggcccccaactggggtcccaacctcaccccgaactctcactcacctacctgctttatcctcagtccctcagctgcacaataggaggtaccagcctcagccccaaagcctttccttcaagtccctaacgggtcctcatcccacctcaaatctcaccccagatcccaaaatggggtccccagccttactccaaaccttcatctgtccactcaaatccctaagtcacgtgtcctggtcccaaattctcaccacagatcccaaaacacagttttcactttccccaaattcttgattcctcaaataaagggtctcatctccatccctaaccctcatctccccccgccccaactcaggtctccagtggatgccccggcctcaatcccaaatccccaccaaatgagggagtctgagctgggtgcggtggctcatgcctgtaatcccagcattttgagaggctggggcgggcagatcgcttgagtccaggagttagagatcagctggccaacatggcgaaaccccatctctactaaaaatacaaaaattagccaggcattgtgactggcgcctgtagtcccagctacttgggaggctgaggtgggaggatcacttgaacacgggaggtggaggttgcagtgagctgaggttgtgccactgcgatccagcctggacaacagagcaagactctgtctgtctcaaaaaaaaaggccggcgcgttggtgggaggtggtgggaatctgtccctgtcgcaaagcaacgcacagccactggggaggaaggggtggattcttgccattcttgggatgaggcagaggcccccctcaccgtgctgggacccccacctccagcatgaagaggcccccatgaggtcaaatagagcttttatgcaattggacaagcgcagacacgcaggatgtgagggtgtttccccagggaggggaggaaccaagaggcgtattctgagccctgaactgctccccgaaccctgcttcccccacctccgccccaggggaagagggagacgcaagcagtgcctccctcccagcctctgactccccagacaaagagtctctgtgtccctgaagaggaggggttggggccccatcaagcctgagggggagatgggggccccccagggtgggaggaggagagggtatctctgtaagctgtgcctcctcccaccccagggacatctgaggctgagacttctccaactaaaagactctcacaaaattcctgccctgccctgccttgctggaagttcttcctatagtctaactacatcttctgacagttctacaccccttccctctatgaaacacttctggatccacattctctgtctccttctctcactctctcccttcaatcagagattcttcacccagaatacagacactaattccccccaactttcacagaaactctccccagccctaaataatttatactcggccaggctcagtggctcatgcttgtaatcccaacactttgggaggctgaggcggctggaccacttgaggtcaggagttcaagaccagcctggccaacatggcgaaacctcatctctactaaaaatacaaaaattagctgggtgtggtggcacacgcctgtaatcccagctactcaggaggctgaggcaggagaatcattttaccctggaaagctgaggttgtagtgagccgaaattgcaccactgcactccagcctgggtgacaagagcaagactctgtctcaaaataataataataatttacagtcataataaaaattataaattaagaaaacagttacaaatggccaaggcaggaggatcacttgaggccaagagttcgagaccaatctgggcaacatagcaagatcccatgtctaaaagaaaaagaaatttaaaaattagctgggcatggtagtgtgcgccggtagccccagctactctggaggctgagataggaggatcgcttgaggctgtggtgagctatgatggtgccactgcactccagcctgagtgacagagcaagatgctgtctcttaaaaacaaacaaacaaaaaccagtgatgtctatagtaggtgcggagaagaaatgtttggcagatgaagaaaatgaggtgcagagaggatttaagagattctctcttactgcctgttcagggtcagtccagaattgagggtctccgggggagggcagaggctttgccctgcaggggatctgtgggagggggttaggagggagcagatgagcccaggatgaatggtcagagtcaggtgctgcccggcggaggtcacgagtccagggaggggatcaacatggccgctgcaccccggactgtgttgatctccggctgctcatcaggaattggtctggaacttgcagtgcaactggcccatgaccccaagaagcgctaccagggtaagaagtgcagggtggcactaggaggcagccgggtggaaacggcttccccagcactgtctcccctacccatccctcccagctgcacttgtgggcttggggagacccaggattccctccaggaatcatcccctcatcctagaaatatttcttgagcatcttctgggtgctctgaatgctggcaacacaactggagatgaaatagacaaaaatctcagccctcaggacgggtgtcatgtggggaggagagggagaatgggtgataaacagataaaaagaaattgttgctctatctggtgggaataagtgctgagacacaaaataaagcatgctgagagtggcagggggtgggtgggggttatttttagaagggtttcactagggcatttcctagattggaataatcactaccctgatgctcactcttccacgtctccccagattattgcttttactgagataagcttcttaagtgctcctgaccttgggggttgaagggatggccttctagttctaagaacttgcccttctgcacctctagaataaatccctgggacctgcatcctaaccaaccaggagaacccctgacccagagggagcatgctggagtcaaagtgggcaaagggttgttacttacaaagaggcgactgggggtgagggcattgccccagttggcagggctgcttctcccagccctctgccctctgttttagagacgcacacagctttgagcatgacagcctgaatgccagtgtgcagggaataacgtgtgtccctatgggcgggcagatgggtgtatgaaactgctggaggctaatgtttatggagcttttacaatgcaccaagctgcattctaagtgccctgaatccaggaagtcatttaatcctcacatcacacccgtgaggcaggcacaatcattcaccccattttattattattttattatttatttattttgagtcagagtcttgctctgtcacccaggctgagtgcagtggtgcatcttggctcactgcagcctccacttcccacgttcaagtgattttcatgccttgacctcccgagtttctgggattaaggcatgcaccaccacacccggctaagtttttgtatttttaatagacaaggtttcaccatgttggccagaccggtctcgaactcctggtctcaggtgatctgcctgcctgggcctcccaaagtgctgggattacaggcatgagccaccgtgcctggcctgccctattttagaaatgaggaaactaaggtgcagactgtgaaaggtctttgctcaaggtctcccagctgcaaagtagcagagctgggatttgaactcaggcagcccatcccttgcacccatgtttcccactatatcacatgtagatgcaagtgaccccattcacgtgcctgctacccacaaatcacactgacccgaagacaagaggcaaatgcccccaggagtgttcatgggtgattatgggtgcacacattgggggatatcaaacacgtatgctggtgcatgtgcagacatagtacatatgctgaggtcctgcttaagaacataagcttgaggctgggcacagtggctcatgcctgtaatctcagcactttgggaggcctaggtggacagatcacctgagatcaggagtttgagaccagcctggccaacatggtgaaaccccgtctctactaaaaatacaaaaaattagccaggcgtggtggtggatgcctgtagtcccagctattcgggaggctgaggcagaagaatggcgtgaacctgtggggtggagcttgcagtgagtcgagatcatgccactgcactccagcctaagcgacagagcatgactctgtctcaataaataaataaataaatatacaaaaattagccaggcatggtggcagtgcctataatcccagctacttgagaggctaaggcaggagaattgcttgaaccgggagacagaggttgcagtgagctgagatttcaccactgtattccagcctgggcaccaagagcgagactccgtctcaaaaaaaaaaaaaagggcataaaagcttggccaggtgctgtggctctctggctcctcacgcctgtaatcccagcactttgggaggatgaggtgggcagatcacctgaggttcgagaccaggctgaccaatatggtgaaaccccgtctctactaaaaatacaaaagattagccaggtgtggtggcaggcacctgtacccctgtaatcccagctactcgggaggctgaggcaggggaattgcttgaacccaggaggtggaggttgcagtgagccgagattgcacccctgtactccagactgggcaacaaacaagagtgaaacttcgtctcaaaaaaaaaatatatatatatatatggctattcacttcagtgttcatatatgcacatatgttggctatagttgtgtatgcatttttttcatggcaatctgttttatgtttatatattttattgtcttacctactaggctataaattccatgaaggcagaaactttatcttatttatttatttatttatttatttatttatttatttattttgagacagtctcgctctgttgccaggctggagtgcagtggcgctatctcggctcactgcaagctccgcctcccgggttcacgccattctcctgcctcagcctcccaagtagctgggactacaggcgcctgccaccacgccaggctaatttttttttttttttgtatttttagtagagacggggtttcaccatgttagccaggatggtctcgatctcctgacctcgtgatctgcccacctcggcctcccaaagtgctgggattacaggcgtgagccaccgcgccaggccgcccggccttattttttattttttgagacagggtctcactctctcacccagacggtagtgcagtggctccatctcggctcactgcagcctcaacctcctgggctcaagcaatcctcccaccacagcctcccaagtagccaggactacaggtgggggccacccaccacacctggcaaatttgtaaaatataatttttttgtagagatgggatctcgctatacttcccaggctggtctcaaactcctggggtcaagcaatcctcccacctcagcttcccaacgtgctgggattacaggcttgagccaccacacctggtgactttatcttatttcatgccatagcctcagcacctagaatagggcatagtgtatagtagatgctcaataaatgtctgttgaactcatggttggaaggatggatataggtacgtggagatgcgtgtacacaagtgtgcacttgttggctgagtgataaatgtaggtgtgtaaacttgtgagtttccatctctctgtgacttgtaacgcaagatcacagacacgtggcgcccacaccaaggggaaaggagctcagtgcctgtccctgctttactctctgccccgcagtcgtggccaccatgagggacctggggaagaaggagacactggaggcagctgctggggaggctctggggcagaccctcaccgtggcccagctggacgtgtgcagtgatgagtcggtggcccagtgtctcagctgtatccagggagaagtggacgtgctgggtgagacttcacagcccctgattcactaagccccatcctggtctgagtatagaccctcaatatggcaaggtctgagcaccagctctctggcttcttcagcaatctctgaacctgggcagaaggggtagaccagttggccaagaggggtagaccagttggtcctaccaattgatttattaagggctgggtgcagtggctcatacctgtaatcctagcactttgggaggccgagacaggaggattgaccagcctcagcaaaatagtgagactctgactctacaaaaaaattaaaaattagccagtcatagtggtgcatgcctaatcccagctactcgggaggccaaggtgggaggatcccttgagcccaggagtttgaggctgcagtgagttatgacagagccagtctggggagacagagtaagaccttgtctcaaaaataattttttttttgagacggagtcttgctctgcgcccaggctggagtgcagtggcgtgatctcggctcactgcaacctccacctcccaggttcaagcaattctcctgcctcgcctcctgagtagctgggattacaggtgcctgccaccatgcccagctaatttttgtatttttcttagagacgaggtttcaccgtgttggtcaggctggtctcaaactcctgacctcaagtgatccgcccacctcgacctcccagagtgctggaattacaggcatgcaccaccacacctggccaaaaatcaattttttttgagatggaatttcactcttgttgcctaggctagagtgcaatggcgcaatctcagctcactgcaacctccacctcctgggttcaagtgattctcctgcctcagcctcccaagtagctgggattacaggcaggcgccaccacacttggctaattttgtatttttagtagagacggggtttctccatgttcatcaggctggtctcgaagcctgacctcaggtgatccactcaccttggcctcccgaagtgctgagattacaggcatgagccaccatgcccagctcaaaaatcaatttttttaaaaaacaaaaatattagagacactagtaacaatctgaggcctggaggtggggcagattttatggaatagaaattctcatatatggagaaagccatatgtggttgggaaaattacttggatgagtcacttggggaagacagcatgatacagaaataagtcataaggtccctaaccttcgcaggaaggtgggtgtcgctgtcttgatgtaatttggggtcagaattgaattgctcatggattaaggggggcactattcccagcagcccttcctcccactcagggctgaggatcccctatgacaaatgctaaactgtgtttaaaggttaccaaggtttcatatttgtccacccaagataccctggactggccttggacttggagtacggggtgaggtgcttcagggagtgtctagaagtaatgctagaagagtgagggactttaaggtaacccttagtacctcttctcttagtgaataatgctggaatgggcctggtggggcccctggaggggctcagccttgctgccatgcagaatgtctttgacaccaactttttcggagctgtccgtctcgtcaaagctgtgcttccaggcatgaagaggaggcggcagggccacatcgtggtgatcagcagtgtcatgggcctgcagggtgagctgtggggacccaaccctggaaatcccaccagtgtctgatcctccccagactgggaggatggcgaatgggttttagatcatattctaaattagcatggaccctgggcacggtgattcatgcctgtaatcttagcactttgggaggctgagacgggtggattgcctgagctcaggagtttgagaccagcctgggcaacatggtgaaagcccgttcctactaaaatacaaaacaatcagccaggcatggtggcatgtgcctgtaatcccagctactcaggaggctgaggcacgagaattccttgaacctgggaggtgtaggttgcagtgagccaagatcgtgccactgcactccagcctaggcaacaaagtgaaactctgtctcaaaaaaaataataataaaataaaataaattagcctggagaattgtgttcagaaggattctgaagttcagaaggaaaaagtggccagacatggtgactcacgtctataatcccagcactttgcgtggcctaggcaggagggctgtttgagctcaggagtttgagaccagcctggtcaacacagggagtcctcatcactactaaaaatttttttagaattgggccaggcacggtgactcatgcctgtaatcccaacactttgggaggccgaggcaggtggattacccaagatcaggagttcaagaccagcctggccaacattatgaaatcccatctctactaaaaatacaaaaaaattagccgtgtgtggtggcacacacctgtagtcccagctactcggggtgctgaagcaggagaattgcttgagcccaggaggcagaggttgcaatgagctgagattgcgccattgcactccagcctgggcaacaagagcaagactctgtctaaaaaaaataaataaataagtaaacaaacaaacaaacaaaaaacaacaacaaaactttggccagatgtggtggttcatgcctgtaatcccagcactttgggaggctgaggctgatggatcacttgaggtcaggagttggagaccagaatggccaacatggtgaaactccgtctctagtaaaaatacaaaaattagctgggtgtggtggtgtgcacctgtagtcccagctactcaggaggctgaggcaggagattcacttgatctcaggaggcagaggctgcactccagcctgaacgacagagtgagactccgtctcccccccgccaaaaaaaaattaaattaaataaaaaaatcagccaagcatcctagtgtgtgcctgtagtcccagttactcaggaagctgaagtgggaggatcgcttaagctcaggagttcaaggctgcagtgagccatgattgcaccactgcaccccagactgcagaacagagcaacaccttatcaaaaaagaaaaagaaaaagagagagagagagaaggaaggaaggagggagggagggagggaggaaggaaggaagggagggaggaagagagacaagggccctaatgaagagaaaaatgaaggggatccccaagcggccccaaaggtttagagaatggagggaaataggggagtttcctgggaccaggtggagctgggaggaggtggcacccggcacccgagaacaacctctttctgaccccatatgaccccatcacacaatgccatacacccatcatcttggcaccatgtatctgctttctctggttcccacatcctctttgctctgtctcccaaagaccccatcaccctggaacccacaaagcccacctcccagaccctcaaagagctctcctccctctgaccctcacaggtgtcatcttcaacgatgtctatgcagcttccaagttcgccctggagggattcttcgaaagcctcgctatccagctgctgcagttcaacatcttgtgaggcgggcacgtgggcagagggggcttggagccagtgatggggaggtggcatcgaaagggggagaggagagatgaagacaatgaagctgagtgcagtggctcacacctgtaagtccagcgttttgagaggctgaaatgggaggatcgcttgaggtcaggcatttgagaccagcctgggcaacatagcgagacccccatctcagcccaaaatttaaaaattagccaagggtggtggtgtgtgtacctgcagtcccagctactcaggaggctgaggcggaggattgtttgaacccaggagttggaggctgcagacagctatgatcatgccactgcactccagcctgggcaacagagtgagaccctgtatcttaaaaaaaaaaaaaaatggacaaaataggtcagggagtggttggggcatcagacttacactacccatgcctggtcgccagcatctccctggtggagccaggccccgtggtcaccgagtttgaggggaagcttctggcgcaggtttctatggctgagttcccaggcactgaccctgagaccctgcactacttccgggacctctatctcccagcctccaggaagctgttttgctccgtgggacagaacccacaggacgtggttcaggtgagtgaagggcccagagccccaagacgtggctcaggtatgttgcggggtgaggccctccctgggtcccagcgctcagggcctccattctgcaggccattgtcaacgtcatcagctcgactcgaccacccctgcgccgacagaccaacatccgctactcgccgctgaccacgctcaaaaccgtggattcctctggcagcctgtatgtgcgaacgacccaccgcctcctcttccgctgtccacgcctcctcaaccttggccttcaatgtctgtcctgcggctgcctcccaacgcgggtgcggccaagatgagcagaacagagcttcacgatccccatccctgaacaaccagacctcttcattccacatctaattcaaaggatgaacagactcttcatttattcattctgcaaactccccctcccctcctctgtgcctagacatggctagaatcccagaagggcctttattttcaggcatagactcctctgtggtcacagctggagcacagagagggaccctgggaacttggcctgggaagcccagagcaggaagccacagctgtctctgggaaagcaagggaggcttcctggaggaagcggcattgttatgagccttgaaggaagagacagactctgctacattcaacctcgtgacttcatgatcctgggcctgagaacacaggaatgattcatagcccaccccccacctccatgcatacaccagagctctgtggaccaaggggtcattcctggtcacacactccatcagcaaaatgtatttgagcacacaccagcaatgtatgtatattttttccattaaatatatatttataaccacaagttgtagttacatttactatttaataaagctcaatttcttaaaattaaataaaaacttaaaaagccagttgaactactggctccaaagagagagagagagaaagcaagcaagcaagccagacatggtgcctcatgcctgtaatcccagcacttgggaggccgaggcaagtggatcacttgagtccaggagtttgagatcagtctggccaacatagagaaacactctgtctactaaaaatacaaaaattagctgtgcgtggtggcaggcgcctgtaatcccagctactcaggaagctgaggcatgagaatcacttgaacccaggaggtggagtttgcaatgaggccaagacggcgccactgcactccagcctgggcaacagaatgagactttgtctcaaaaaaatacaaaaacaaaaactcatgaatggataaacagacttttgtatattctttttttttttctttgagatggagtctcgctctgtcgcccaggctggagtacagtggcgcgatctcggctcactgcaagctctgcctcccgggttcatgccattttcctgcctcagcctcccaggtagctggaactacaggcgcccgccaccacacccggctaattttttgtatttttagtagagatggagtttcaccatgttagccagcatggtcttgatctcctgaccttgtgatctgtccacctcggcctcgcaaagtgctgggattacaggcgtgagccaccgcgcccggccaacttttgtatattcttaaagaggaaggaaattctgatacgtgggtaaatactgagaataccatactgagtgaaataaaccagatagaaaattccacttatctgagatgcctaaggtagtcaaattcatagagatagaaagtcactcagtgggcgccaggggctgagggaggacagaatggggaattagtgtttcatggggacagagtttcagtttgggaagatgagaaagttctggagatggatagcggtgatggttgcacaacagtgtgaatgaacctaaggccactgatctgtacagttataaatggttaaaatggtaatttttttttttttttgagacagagtctcgctgtcacccaggctagagtgcagtggcacaatctcagctcactgcaacctctgcctcctgggttctagcaattctcctgcgtcaccctcctgagtagctgggattacaggcgcccaccaccacgcctagctaatttttgtatttttagtggagatgggttttttccatgttggccaggctgatctcaaactcttgacctcagatgaccctcccgccttggccccccaaagtgctgggattacaggcataagccactgcgcccagccaaaaatggtaaattttgtagtgcacatattttaccacaactttgaaaacagacatagagtgttttagtttaaaaaaaaacttaatatagaccaggcacagtggctcacatctgtaattccagcactttgggaggccaaggcaggtggatcacctgaagtcaggagtttgagaccatcctggccaacatggaaaaaccccatctctactaaaaatacaaaaattagctaggcattgtggtgcgcgcctgtaatcccagctactccagaggctgaggcatgataattgcctgaacccaggaggcagaggttgtggtcagctgagattgcacctctgcactccagcctgggtgacagagtgagactctgtctcaaaacaaaaaccaaacaaacaaaaaaactgaatatatactttttaaaaaactttttcactaaaagcagcatactatacaaataaatgtgaactttagttgtttccttggatcatgtataccttggaggattttcttttttttcttttttgagacagggtctcactctctcccccaggctggagtgcagtggcgcaatctcggctcaccgcaacctctgcctcccgggttcaagtgattctcccacctcagcctcctgagtagctgggactacaggcgtgtgccaccacgcctggctaatttttgtatttttagtagagacagggtttcaccgtgttagccaggctggtctcaaactcctgactgattcgccctccttggcctcccaaagtgctgggattacaggcatgagccactgtgcctggtcgcagggttttccatatcggcccaagcagacatcctcattccttgcagatctggagtttattccattgtggagataaacaataatttatgcaactcttttctctactaatagatctctggattctctccaaatgtttgctattacataaatggcagcaatgacaaacctcatatcatctcacacatgtgcaagagtttctgtcatgagattatttggccaaagtatctaagcatttgtaatttttctgaacattatcaaattcttgtccatcctggaggaccaatgtccatatggtagcctccttgcttggcaatacctttggcacacaccatattatctgtcttctgaatttatgcaaatctaatggataaaaattggtatcttggtgtggttttaaattgtacttctcttattatgagagaagctgaatatcttttcaaatgttaaagaaccttttgtgtttcatttttagtgggcattctgatcacacctttgcccaatttattttctgttggattgttgatgtttttattattcatttctagaaactttatatattgaggaaattaaggaatctgatacgaagtgcagacacttccattcccagtttgcttttttttttcttttttaacttatctgttaagggtgtttggccttatttttatgttgtggaattgttattattactattatttgagatgaagtttcattcttgctgcccaggctggagtgcaacggtgcgatctcggctcagcacaacctcctcctcccgagttcaagtgattcccctgcctcagcctcccaagtagctgggattacaggcatgtgccaccacacccggctaatttttgtattttcagtagagatggggtttctccatgttggtcaggctggtctcaaactcccgacatcaggtgatccacctgcctcggcctcccaaagtcctgggattacaggcgtgagccaccataccgggccattattattattttacttttaaatttcaagacacagaaacaaagaacatactgatagcacagtggctcacgcatgtaatcccaacactgggaggtggaggcaagagaatcacttgagtccaggattttgagaccagcctgggcagcatagcaaaaccccatctctacaaaaaattttaaaaaattagcctggtgtggtgtcatgtccttgtagtctcagctactcaggaggttgaagcaagaggatctcttgcatccaggaattagaggctgcagtaagatatgatcgcaccactgcactccagcctgctgagagagacagtccctgtctcaaataaataaataaataaataaaataagaaaagacatacacagactgattctgttaaaacacaaagacaggccggatgcggtggctcacgcctgtaatcccagcactttgggaggccgaggcgggcggatcacgatgtcaggagatcgagaccatcctggttaacatggtgaaaccccatgtctactaaaagtacaaaaaattagccaggcatggtggtgggcgcctgtagtcccagctactcgggaggctgaggcaggagaatggcatgaacccgggaggcggagcttgcagtgagccgagaccacgccaatgcagcaagccgacattgcaccactgcactccagcctgggtgacagagtgagactccgtctcacaaaacacacacacacacacacatacacacacacacacacacaaagacaatgtcaatgctcttttcaaacctctgcagtggtttctcctcttatttagacttttttttttttgagacagggtcttgctctgtcattcagatcgaagtacagtggtgcaatcactcagcctcaacctgctaggctcaagagatcctcccacctcagcctcctgagtagctgggaccacaggtgcgtgccaccatgcctagctaactttttaaacattttttgtagaggggggtctcactatgttgcccaggctggtcttgaactcctggtctcaagcaatccttccaccttggcctctcaaagtgctgggattacaggtgtgagccatgatgtccggcatgcttcccctcttatttagactcagatcaaaactgcatcatctgaccaatgaatatttgtctcaaattatctcccactttttccccatcacctactcattccagcaacactgacttctttgctgtgccgtttcgtctgtctgtctgtctgtctttatctctttttagagacagggtctctctctgtcacccaggctggtgtgcagtggcatgatcatagttcactgcaacctcaaactcctggattcaagtgatccttcagccttggcctcctaaagtgctggtattactggtgtgagccaccacgcctggcctacttgctgtttcttaaactctccaacctcaatacctttgcacttgctgttccctctacatagaatgcttttcccaaatatccacaaggttcccttcctcatttccttcatgcgctcaaataccacctcctccaagaggtcctccaggctcacctcaagatagcacactgtccctttattttcttacgtgttttatttcccatgatctgacatggttctctctcttttttttttccttccttccttctttccttcctccctccctcccttcctcccttccttccttctctttctttcattctaaaaacaaataatcatagaaacgggggtcttgctttattgagcaggctgcttttgaattcctgggctcaagtgatcctcccacctcggcctctcaaagtgctgggattacagacatgagccaccacgcccggcaggcatataccactgtttcttgcttgtctccacccactaaaatgtcagctccatgggcaggggactgttgtctatttgctctacccacatcaccagcaccgtggaaaccaaaaaatgactcaaggagttaaccaagctggcacatcctggcagtacagtccaccctgagaagctcctgacacctcctacctggacaagacagggtacttctctgaccctcagtttcttcatctgtgaaatggaacttgccagggagaaagttatattaagggctggaatgtagtcggggtctaataaattagagcccttaatagttatgttgatggtagccttattccttggtctcctgggtcctgcccggccttccctgggaagctctgagctcaaagccctggaggagggagtaaaaccagaggctgcatctctgcaaggacacatccctgcaagtccacccctcccgcccgcgccttctcggtgcaaactcccgatcccagggaggggaaggcgggcggaatctgagcggcaggcgcagctgctccgggcgggcggccaaggttccctccctcgagcactggcattcctgagggaggggccgagcgcagctgcccgcctggccggaggctcgcttgcgccctctggtgtccaagtacgagaggccacgtggacttgcgcaccagcagccggtctgttctaggccactgtctgcagctcaggtggacctgggtggagctaggtctaccccctacctttcttgggctcccttttcttatccgggttcacgaactcagcttccatcactaaacttgctgtgtgaccctgagcaagacactcaacctccctgtaccacagtttcttagctgtgcaatttgggacaggatcctttacctttttagtgccactttttctttctttctttctttctttctttctttctttctttctttctttcttttctcctttttctttctttctctttcttctttctttttctttctttctttccttctttctctttcttttcattcgtttgttctttctcttcttttctttttctttttctcttctttctctctcttctttctctttctttctttctttctttctttctttttctgttatagagatggggtctcactgtgttgcccaggctggtctcaaactcctgggctcaagcaatcctcctgctttggcctcccaaaatgctgggattacaagagtaagccaccaccctggttgccttcgttttttctttttctttctttctttcttttttaatttttgggacacaatctcactcggtcgcccaggccagagtgcagtggcaggattactgttcactgtagccttgactcctgtgctcaagcgatcctcccacctcaaccccctgagtagttggtgttatgcatgcgtctaattgaagagacaccctgaacaggctaagtgtgagcaacaaggctgtttactcacttttcggctaagtccaaaaagggaatcagcaaagggtggttggagtggaactggttttataggtttggggtaggtagtggaaagttacagttaagggcagtttcttcgggcaggggaagaatgtcacaaggtgcatagtcacgaggtgggaggtcacaaggcacgatatcacaaggttgattgattagttagggcagggcaggagcagatcacaatggtggaatgtcacaaggttggttaataaattaaggcaggaactagctgtttcttctttagtggttctcctgttgctccaggcttcgtgactccagggggcctgtacgtgtggctcacagggatcacaatggctggaccatggtgtagcctgttcagaggaccttacattcctgtctttttatgtttaataatgaaaaataaaatgagaaagaaataaaacgagaaagagtagtgtaatgttgggatgttggggtgaaaattttcgggatggtatggaggggtgatggatgatgttttgggatgatgggtaatgtttctcaggactgcttcaagcggggttaggggcagcatgggaacctaaagttggagagattaaactgaagaaagatcttggtgtagggggtgatattgtgaggttttaggaggagtatttgccgtattgattgattagtaatagcttagatgcaattttgtataaactgagagattagcctgaaaagacaaggtccgatcaagaggaggagaaggatgaaagggcctgttagtggaaggagccttgaagctaggctagagaatggcaaggtaggtccagaataattatttgcctgatttgcaagtttttgagctttgtctttaaattttttgatgttatcatatacgaggccagattgatttaagtaaaagcagcattcttcatttaagaataggcagagtcctccttttccaacagtaagcagattgaggcctcggcgattgtggaggacaactgcacccaaggaatcgacctgggcttggagggcagagagtgtttgagttatatcgataaggctagcagagaagtcattggagagactgagaaaggtagtgatgttgtaaggcctgctactcctgtcccgattgaagcggcagagacttctagtcctacaaacggaattaatggaatgacttttttttgtcgtgctgaggttaagagaggaacgggcagctattcgctaccatttgcaaacttgattttggaagtaaggaaaactagagtacgggttcctgtctgattggcagggaggcacatgtaggtggaaaagccacagagaaaaaagagtccttgaggcatgcaaaactggaagtgcagagtaaaatggtgagagtgtgttttggaagtggggtcctgcacccagacccctagggatccagcaagggcagcagctgttaaaggttgtagtggggtttgatagggtagttgtgtagagggagaggttctgttttcatggaagggtaaaggaacataaggaagatgggaggctccctaagggaattccagtaggtaattgctgggagacgtataagggggcagcaatggggatagtttctgtgtagtgaggggtccaagaacagggggtgtggcattgatataggcagacagctttttttaggtaggtacagaggagagtggcagcttgttgttaaaacatgtcaggggaatttttactgaatttgtctagaaagtaaagaagttgttcgggagggcaaaggtggggggtcactgaaagaggttcggaggtgtagggagatgggggaggttgcccagtcagctggtagggcagggacagctgtgtagtaggaggaagagagggaaatgcatagccaacaatttttggccaaggaaggaacaggatggaggggaggacaatctgattaataaggcgaaggtcttggactagtctgtaggatttatctggcttttgaacaggtagggtgggagagttgtaagcggagttggtaggaactaagaggccatgctgtagtagacaggtaataacaggctttaggccccttaatgcctgttgtgggatggggtattggcattgagcaggataagggtggttaggttttaatgggatgataaggggtgaatggacagttgcaagggaaggagcggaagtatcctacactttaaggttgaggtggggagatgaaaggggaggttgccagggagggttggaattggataaaagggtagctatgagatgtggctgtagtccaggaatagtcagggaggcagataatttagttaaaataccttggcctgataaggggactgggcaggtggggataaccaggaaggaatgcctgaaagagtgttgcccgatttgacaccagagttggggacttttaaggggtttagaaacttggccgtcaatacccacaacagttatgggggcaagagaagcaggctcttgagaagaaggtaatgtggagtgggtagcccccatatcaatcaaagggacggacttaccctccaccgtaagagttgcccaaaactcggtgtccatgatggtccagggggcctccgagacgttcgggcagcgtcagtcttcagccgccaagccgaggagatctgcgaaggagttggtcagggagtttcgggtttgagctccaggagctccggcagtggcgataagagtccgacagtccgacttccagtgagggcccgcacagaccgggcatggcttggaaggaatgccgggctgcgggcattccttggcccatggccaggttttcaacccttgaagcaaggtcctggagcggggatttggacgtcttgaggttcttacacgtaggcggtgcagctggggtttgtcttagggcagaggcaagcctctgcagttctgaaatacgccgctgccaggcagcctcttccctgttattgaacaccttgaaagcgaggttgattaaatcctgttgtgggatttgagggccagactctaatttttgaaatttctttctaatgtcaggaactgactgcgtgataaaatgcatgttaagaataaggcggctgccgggcgcggtggctcacgcctgtaatcccagcactttgagatgccgaggcgggcggatcacgaggtcaggagatcgagaccatcttggctaacacggtgaaaccccgtctttaccaaaaatacaaaaaattagccaggcgtggtggcgggcgcctgtagtcccagctactggggaggctgaggcaggagaatggcgtgaacccgggaggcggagcttgcagtgagcggagatcaggccactgcactccagcctgggcgacagagcgagactccttctcaaaaaagaaaagaaaagaaaaaaaaagaataaggcggacttctggcccttcagggtctagtgctgtatatcgcctgagggtggcagctagatgggccataaactaagctggattttcatatttgttctgagtggtctcttttagtttgtcataactgatgactttatatgcagccttctgaagcccttgagctaggcaagagatcatatagtcccgcctggctatgccttggacccctgcgtggtaggtccactgggggtcttcacggggtacttccctggcacctttttggaggccaggctcaaggcaccagtggtcatcagcataagactgagctagggtccaaactcgctctcgctcctcaggagtgaacgtagaggtgaggatgacgtttaagtcattccagttaagattatagcactgggttaagtatcggaattcttgtatatagttcgtggggtcagacgggaaagagcttaggcgttgactattttgggagagttctgacagggagaaagggacatgaacctggactattccttcggctcctgccacctctcgaaggggaaattgctgggcaggggcagggggaccggccacggggccaaattgtaagccagataaggtgtgaggaggggtggtgatgggaggggcataagggggtgggctgtgggtagaagagggatcaggttctgagggggaattagaacgagttcgggtgggtgagggggagaaatatcagagggattaacagacacagaggaatcggcattgccaatggaaaaaggaggggtagacggaagggagataaggaaaacttgggacaggtcacattgggagcagacggtagggagagatcatagtgtaaaaaaatgcctggacatagggtacctcagaccattagaccattttgtgacagaagttgtctaagtcccgcaaaatagagaaattgaaagtgccgttttctggccactgagggctgttgtctaatttacactggggccaggcatgttacagaaaaaaataaataaacgtttaggctttagattgggtgaaagctgaagaggtttgagatttttgaggacaaaagtcagaggggaagaaggagggatggagggcgggaggttgcccatgatagaagagggaagattggatgggaaagaaagagacaaagaatagagcaaccacagggatcttcggtgggcatcccgaatggaagtcctgggttgtacggctgtgaccaacgctggatttcagaaacacagataaaaggaggttccttgtctgaaagaaaaagagagagagagacgaagagagactgaggcagcttaatcgatctgtaggcaggagtggggtcattttgcaggggtgggtctgaagtcccaaggtggaagggagtctcttcaaggaagagtgcaggggaatgggggtaggtgtcccggaggagatcctctatcccgggctttcagcaccaaatgttctgcgcgcgtctaattgaagaggcaccctgaacaggctaagtgtgagcaacaagactgtttattcactcggatgcaagcgggctgagtccgaaaaaagagtcagtgaagggtgattggagtggaactggttttataggtttggggtagggtagtggaaagttacagttaggggcagttttttcgggcaggggaagaatgtcacaaggtttatagccacaaggtggggggaggtcacaacgtcaattgattagttagggtagggcaggaacatatcacagtggtggaatgttccaaggtcggttaataagttaaggcaggaactagctgtttctttggtggttctcctgttgctccagcctttgtgaccccaggaggctgtacatgtggctcacaggggtcacaatggcttgaccttggcgtagtccgttcagaggaccttacggttgggattacagtcacacacaccactatacccagctaattttaaaaaaaacttttgtagagatagggttggctatgttgcccaggctggtctcgatttcctggtctcaagcgatcctcccggctctgcctccctaagcgctggaattccaggtgtcaacccgagtctggagagttttttcatctgtaaaatggaccagtgatgatccttcattcattagattgctaagagaatttaaacagacagtccaggtgaatgtggctacagtaaaaatatacactccaggctgggcatggtggctcacacctgtaatcccagggctttgggaggccaaggctggaggatcacttgagcccaggagttcaagaccagactgggtaacatagggagacccccgtctttaccaaaaatacaaaaaaattagctgggcatggtggtgcctgcctgtagtcctagctacttgagaggctgaggtgggaggatcacttgagtctaggaagtcaaggctgcagtgagctatgattgtgccactgcactctagcctggatgacagagggagactgtctctaaaaacaaaaaataaaaataaaaattttaaaaatggctcagatggttctacctggcaattcccactgtgtagatggagacactggtactgggagacagggctcagactggaggaaaagaagggaaggactgcggagacaggccctgatgccctttgcctttgggcagttgcctgtcccagactcctgcaatccctgcccccaagagagggaggatgtgaacacctggtgaaggggaacactcacccccagcccaggcagagctaaacagaaccagtggaggccaggcacgatggctcagacctgtaatcctggcactttgggaggccaaggtgggcggattacgtgaggtcaggagtttgagaccagcctggccaacatggtgaaacctcgtctctactaaaaatataaaaattagccggttgtgatggcctgcacctgtaacctcagctacttggggggctaagacaggagaatcacttgaacccaagattgtgccactgcactctagcctaggcaacagagtgagactctgggggaaaaaaaaaaaaaaacagaaccagtggagattcctgagaccctgggacagtaaatagacactaatgttctagaaccttccaaattaactataatttgcttccctgagccaggctttaatttgattctattgagtctttgctctctaaaacatcaacttaaaagcattagctgaagactcactgctcctcagctgcctgacatggggcaaattgtttagcctcttggggcctcaatctcctcatctttgcaatgggtgagaattacttcagcatagctgcaagatgacttcttcttttcttcttcttcttttgaggtagggttacccaggctggagtgcagtggtataatcacagctcactgcagccttgacctcctgggctcaagcaatcctcccacctcagcatcctgagtagctgggactacaggtgtgcactaccacacctggttttttgtttgtttgttcgttcgttttgtaggggcagagtctcactatgttgcctgggctggtctcgaacttctggcctcaaacaatcctcccgcctcagcttcctacagtgccaggattacaggcatgagctaccactcctggcccagctgcaagacttctatcaggggacatagagcacattgaacagtgtctggcacctagtaggtgcttgacaaatgcccaaggaataaataactagatcctactcctccctttgcttctaacatccttggtttcagctctctacaaaggcaggatctaggaaatgggcacacattaagccccaattcatgggagactatgagatttcagtagaaaatgcccttcgtaagtaagtttgcagtaaatgtccacaccacacaggaagggattttgtctgtcatgttcactgctgtgtccccagtatgctaagtaggggccagggtcaaagtaaatgcttgatgaatctttgccggataaatgtatattatctgctggatgcagtggctcatgcctgtaatcccagtactttgggaggcagaagtgggcggatcatgaggtcaggcgtttgagaccagcctggccaacatggtgaaactgcgtctctactaaaaatacaaaaaattagccggatgtggtggtgcacgcctgtaatcccagatactcaggaggctgtggcgggagatggcttgaacctgagaggcaaaggttgcagtgaaccaagatcgcaccactgcactacagcctgggcaacagagtgagatccatctttaaagaaaaagaaaattatattatcatttgatggggggatcagggacccttcaataggcaaaatttcccaagctggctgaattgacatcactgtagggtgcagattcaaacagactcatcatcaagcccaactgcttcttagaggcagacaccacaaagccgtctcaacattctctttaataagcctgctaaacattgagaattatttgaggacagagaaagcctttttccaggaatgcttcaagcatgatgtgtttccttccctggtttaatatgtataatttgccttctggaaaaggaacccagagactctggcatgacttaggaaacaatagacaatggtcacaatttactaagcataactgtctcctgcaaggatgacgaaatccatatagcgcaaggatttgaagcccaagaagaggactttgacctatggatttctcaggaggtttcgttatggtggatcctggagtcagatggtcaaatgccacatgctgctcactcccggaattgggaaatagggaaaaaatgccagcacctcccctgtttgtgcagctgccctgttttgccaatttcacaaaggcaaaagtagggaaaatccatccaggctagggtagaaagatgtttgctctcctcctgccagccaatcccaagcaagccctgagttcagtgtcctgggtgtgcaaagctccttgctggcggaggggaaggctttaggatatgaccttcatggccaggcacagtggctcatgcccgtaatcccagcactttgggaggttgaggcgggtggatcacttgaggtcaggagttcgagaccagcctggccaacgtggtgaaaccctgtctctattaaaaatacaaaaattagtatttttgtactaagtacaaaatgagcttgctggcccatgcgtgtaatccccgctacttgggagactgaggcatgagaattacttgaacgtgggagacagaggttacagtgagctgacattgtgccattgcactccagcctgggtgacagagccagactctgtctcagaaaaaaaggggagaggggcgtggataagaccctcatggctcatgggacaggcagttctcctaccactctggcccccaaggaagcggatggggcacttctcaagcatatcttggaggcttggctgggaagtaagaaacacccccaactccgccccattggatttatagggattcttgccccacacctgtttagatattaactcagccactacaagtcaaggcaaacaggccagggccagggcagacaagaggacagacaagaggacagacatctgcagcctgtggcctcctgtcaccctcccacccaccatggaaatgccctggcccctagggtggattctgcttcttttgggaagccccctcatccacgctgagcctctgtgagtctggggaatggagggggctcagccggcttcctgcacatctgatgtctgcgtgattccagcttatgactcgtgttcggtgtcattttccctactcaagtcccttaatgcccttgtgttagtctactggcaggtacatcctggtgaccccccgagttctgagggttggcagtccggagagcattcacattcaggcccactcagactccagacagcccctcacaaggaccctcaaggtgaacctcacagtgtgggacttccccatgaggaagacagtgttggcaaggagccagctcattctctcaccaggaaacaactttatggaccaggcacctgtgacggtgggtgacaggctggaatgtgtgaccccaaagggaggctacaggtcagcaataaaggtagaaaggggcagactttctgtccagagagtagataaagggcccaaagtacttaccactcctctaatatcctgtgcatttagaagccaaaagtccctaagcctgggctccaggaagcctccactagcccatttgatgcctctctgagaactataaaaggtgccttctgttggtagcttgggaagatgagcatggacttgatttcgtccttcctttggctgggtgctcttgtgcagtgagcaacctacacaactgcacatggcaacctagctcccaaaggcagagtcagaagaccctcagtcaattgctcctcccaggatctgtcccagggctttacccccagccagggagaccccagcagagcctgaggagtatggatatatatctctctcaggttcccgagagcctgatgtacctcccaaaaccagggcagcaatatgtcatcatccgggcaacttgggcacccacctcgggctcctcattcatggagaagatggtgctggtggctcttcatgctggctacatctttatccagacggagaagaccatctacacccctgagtacttgggtacagccccgaggcacttggctcggggcaatcactggctctcatcccgtctctcccaatgtctgagatactcccatcccctaaaatcttctccacctcccaagatctctctctatgcataagtgccccccaccccgccactgcccaagatgcaaactctctctctctctttcccttcctctacccaatactcagagtcctccttctcccctagttcactaccgggtgttcactgtgaaccacaagatggaccctgtgaccaggacattcactctggacatcaaggtggtctttcccgatgaggggtggggggtggtggtggatcctggacactggggttacatggtgtgctgaagtcctgggggcatgagccaccagggccctcccagagggcagtcaccagccccaccccctatccccacagaacccaaagggaatcaccgtgattagccagagtctgatggccaaggatggcttctttttcagctcctttcacctcccagagcttgtcaggtgcccttgtcaggtctgggagcccgaggggtggcaaaggaggctgtcattctctgtctccatctctcttaactttctgtgcctcagtttggggacctggaccatcgaagccagctaccaaagtacacccaagcagaagttcgaggctgcctttgatgtgaaggaatatggtgagaaaggtgtgggtggggtgagcaagatgaatacgccagggacaggacttggaatagaaaggaggtctcaaggggaacctctgctgtaacccagggcctgagctggatgctaagtgttgggtgctggtgttgcagcccttcgggcttgacagagccaccaaggaaggagcaggactgggaggggacgagggagcaggtagaatactgagggtgaccatggcttttttttttctcccagtcctcccatcttttgaggtccagctggtcccaaataagactttcttttacctcaaggatgaggctctgggcgttgacatccaggctcggtgagcccccttcctcccagctctgccagaagaccagggacacaaagattgagtacagagaaacaagcaccaggtgctatggctcacatctgtaatcccagtgctttgggagaccaaggcaggaggatcacttgaggccaggagttctagaccagcctggacaacatggcaaaaccccttctctaccaaaaaaaaaaaaaaaattagccaagctggctgggcatggtggctcacacctgtaatcccagcactttgggaggttgaggtgggtggatcgcctgaggtcaggagttcaagaccagcctggccaacatggcaaaaccctgtctctactaaaaagacaaaaatagccaggcatgttggtgcatgcctgtagtcccaggtactcagggactactgaggtgggagaatcgcttgaacccaggaggcggaggttgcagtgagccgagattgtgtcactgcactctagcctgggtgacagagtgagactctgtctcaaaaaaaaaaaaaaatagccaggagtggtggcacatgcctgttgtcccagttactaggaaggctgaggtgggaggatcgcttgaacccaggaggtagaggttgcagtgagccaagattgtgccactgcactgcagcctgggtgacagagtgagaccccatctcaaaaaagagaaagagagaagcaagccacttctgtagcatttagggtggtagacatactcttctcccacccatgagatattctgggctacctatgttgtcctgtgaggttgtacagaccatgtctgccacctgtgaggttgtataaaccatttcttcaagtctatgaagttgtacaggccaccttgtctacccagtggtgttgtactgcatctcatctcatctgccacttcacagtttagaccatctctgaaagtctatgaggtagtacaggttatgtttgccatcatgagattgtccagaccatctctgcagctctatgtgatggtaaatgacacatttgctgccttgtgttttacagaccatctgcattgctatgaggttgtgcaggcaatgctgtccacctgagattgtatgggctatgtctgccacttctggacattatatgaatcattcctgcagctctaacatgctacacaggccacctagtttccctggtgaggctgcacaggccacttcataggttgcccagacttctttgtggctttatatagtttgaagtccacctccaccatcttgagagattgcctagaccacatctgcaacccatcaaggctttatgggatatattcgtcacctcccagagttgtgtgggtcatcaatgaaaccatctaagtttccaagggccacctctgcccctcccaattttgcacagccatctctgaagcagcatgaggtatgtgggtgcttcagagacagtggaattgtcctccatcccccacgtatatatttaacaagccagtggacggacatgctttggtcatctttggggtgaaattggactcctgccggatccctatccaaagctccctgcagagggtggaggtgactgaatcccagctcctccccaacctccaatccactccactctctaacgctccccaaaaaaccatatcctctcctctatcttaccctaagaacagatctctgaaggcctgggccacgtctccctccagaaggacacgctcatggccgcattccaaggcccaggagaggacttcattggaggctcaatctttgtcaatgtcaccatgttctcctcaggtgccaccctcaccccggcccctgactgaggtcaggacatggtgttcttgcccaatgcagacactccacccatgtgaccttgggccacctcccagcctcagtttcctcattagagaaatgggtggaaggagctgaaatagtgttattgtcgttctctgccttcaccaagatggggctctcatactagtcctgccactcacttaagaaattgaactccctcacaaactctgtgttctcactgtctctacagggggtgagatggtgcaagctgagacctcaggggtgaagatcatccagagcccatacaacatcaagttcaccaggacaccccagtatttcaagccaggaatgcccttccactttcgggtcagagtctggactcactacacccagggactcagggccccctccccaaagcagacttcccacaaagagacaaaaacccacactggactcacctgcatccaactcatctgaaggttgagtctatcatgttccccagactaatcccagagtccccccaaaccttaaccctaaagcacagtgatggctccagaatttctctgtggggacttagaggccacaatcaggctggaagttggtgtttgaaagtttatctagaggctgcatttgcacatcaaagcatggccttttcacatatattaatttggatgggcattaggaaagtcagggatatcctttggcaccaatcctactccaagtctcctataggctctcatgtgtcctccttccctctccactctcagtcttcccactcaccatcagctctgcaacacccaggataaccacatgtggttgtacactgcaaagctctaggaggtgccattcataaaaactccaatatgaatggtgcccccggtgttgtttagtgcaccatgtataaagttgtacaaagcagtcctattcagatcatattccagtctcacctctcacaccaggccactgcaggcttttccttcaccttaccccagattccacctcaggtcttcatctcaaatcctgatgggtccccagcttccagagtccttgtccactcccaagaccaaaaagtgtacacctcagctgaggggttggccactctgaccatcaacacagatgcaaatctggacaagctccccatcgaggtaccaacttgacaaggcaaggagggtgggattagagctgtgtgagttggaagggttggggtttacttgcccatcatcctccctaggtgaaaactgaggaatctcttcagccagaggagcaggcttcagccaagatgacagcttggccttacttgactcaggatgggtcaggaaacttcctacacatcgaagtaaagacattgggcacagaggttggcagcagcatccagctgagcctcaacacaaggcatcaggaccctaaaaccaaggacaagattactcacttcaccatcctggtgaggagctaggaccagggtctgagtcaaggaattctttccttggaaaaaccttggcttgctgagttggagaaactatgaaaaaagatgtgaaggtggcaacaatcttgagtgggctcagatctagaggctgaagaaaagagactatgagcctccattgtgggatgggacagattcagagaaagactggccctcccttctcatccttgacctcccttgtcttcaaggtcctgagtaagggccagaccgtgagtgccaaacatcagtcaaaaagccaggggagtgtctacacatcagccattattgatgtgacttcagcgatgctgccctccttccgcattctggccttttatttacttcccagaggagcaagccaagaccctgagttggtggctgattccatatggattgatgtgaatgacagatgcatagggatggtaagccaaactccttgtagttgtgcatcaccatcataaagccccagaaaggggctgtacaagtttaggcattcccaaactagaagccagggaagagaaggagaatatgtggccttaagagctcaacacaaggtgtggcggtgatgcaagtaaataaatatacggagttgggattagcctagtggagttcccagatgctccaccagagcagtagggaacgtaagcctgaaagtgtagttgtgtggtctatgattccctttttctgacatctctctttttcttggctcagctgaaagttggcttgaagaatgatagattcttccagtctttggagcccaacagccaagtcgaactgaaggtgacaggtgatgcagaagccacagtggggctggtggctgtggacaaggctgtctatgtcttgaacagcaaacacaagctcactcagaagaaggtaagagcatgtgggctttgggccaagatgttgccaggatattctagctggagcctcagcttcttcagccataaagaggacaacatcaatgtaaggattcaaggagatggtgcaaagtctaatgactgaaaggtgataagagctcaaaaaatgggagatagtatgagaattatgatttgagcctgcaattccagtacaccatttctcctttcatggaggagtcatacaggtcccaaatccaggttcctgtcttgacctctaggtctggaatgtggtggaggaacatgacattggctgcacaggaggaagtgggaaagacagatttgctgtgttcaaggatgctggattggacctgaaaatcagcacaggaatggatagcctggcaagctcaggcacaggctttgggggttggggcaagaggagggcagaaatgggtgcagtgctgcctacttggttttagtgtcaaacagatatgggctgtaatccacatcctgtcacttaccatgggccagtcacatttctctctgagtcttgatttctttgtccataaaatagagataataatagaagtaactcacagtgtgttggttaagacagggttagccatgtgtatcaaatatacaaataacagtaggtcaaacaggtagtttatttctcattcagtaacactacagaggtcatcctgggactcggactccttctaggagtccatccatgccaggcagcaagatgaagggaagtggaaaggggaggacacttcttccacatctcattggccagaatatagtcacatggccccacctaagtgcaagagaggctgggaaatgtagtctttattctgtgtgatctatacaatatggaggcttacttgtcacagatgagggatgataatggatttggagacaactaagagtgtattctctcagctataaattgtaatattaataatagttcttatttattacatgccaggtccagtgctaagtatttgtatatgcattatctcattgatagaactatgattatgcccattttacgtcactggggaaattaacacccagagaggttaagtgacttattgaaaatcgcccagcttttaagtgacaagtcttgaatataggaggctgtcagatgaaatgaagtgatgcatataaagtgctggacatacagcaaacacccaataaacatcatcaaggatattgataatgatcttggcggttgttctatcatcattccctctgacccccagactagccctgcccccaggaccctcctcccagccgccatcgccgctccctgaagaggctggagacaaaaaggaatgcaggtcagtgttaaagctgtatgtctccctccatctccccaacttaaggtatccatcagggcttagaacaggacaccaaaaccactcaatgtatttccagcagggagggatctaatagggggagtttggtgcttacaaaatcattagatgggcttttggggtggaagttggaaggctgcttgctgggactcaagatcacccacttcagtcttgcaatccatgaaatatcaggaaactgctgccaatatctctcaaagggctggtaggttgataatcaaacacgaaatcatgcccattacaaaaacacacatagactagagcccacccatcagctaccactgctgcaggaaaaatggtttctgcttctcttctatctcccagatctctcataaaagcatctcagtggctgcatctaatcccattcagaaccctagcagcaagggagtctgggaaatgtagttttcagatgtctagcctctgtggttcaggatggaatgtagacaaaaggagagataggtcttgagtgtcattggacaatatctgactaaactgccatcctgaaggctagaatgtggaccagaagaaaaggctttgagcctggagtcagaggaagatgggaggcagcaccaggtgttagaagcatggattctgaggctggcatggtggctcatgcctgtaaacccagcactttgggaggccaaggcaggtggatcatttgaggtcaggagttcaagaccagcctggccaacatggtgaaaccttgtctctactaaaaatacaaacattagctggctgtggtggtgggaacctgtaatcccagctacatgggaggctgaggcatgagaatcgcttgaacctgagaggcagaggttgcagtgagccaagattgcgccactgcactccagcctgggtgacagcatgagactccatctcaaaaaaaaaaaaatgcagtatggattctggttccacctctgccacttgggagccttgactctaagcaaatgaattcacgtctctgtggctcagcttccttgtcagaatctcaccatgtgagttcaatatgaggcttcagaaagggcacagataaggcactaggcatagaatctaccacagagtaattgctaaatagtggcaaggtgtgcatagcatcaaggtgaatgggtcccagcttcttaggtcctgcccaaccctcctctttccctctgactctggcccacagtgaacaagtttaagacagagctggagcaaaagtgctgtgaggctgggctccgggagagcccagtggggctgtcttgtgaggagaggacctggcatgtccgccatggtccagcctgtgtggctgctttcctggactgctgccatctgtctgagaccctgactcgggaggctcgagaggatcaattgcatctgtggacaagtgagggggctatggcaggagatgcagggtggggggcttcatggagggatatagagtgacatgggacaggttaaggggtgatatgggccatggagggttggaaaggaggactccacaaggagtctgatggaacatggaagaaacatgaaggagactccacctcacacctgctccctccagcggatgaagaagaggacttcgatgacctcttcttggatgacatgcctgtgcggaccttgttccccgagagttggctctggaggaagttcactctgccaaagagtaaatcggggtaagacatcagcctccataccagaatctggtcccaggtccttgcaatcatcagtggatgctggtcagggacaatgaccccagcagtgacatcgagcctcaggacagtcccataattgggaaaacatcttaatggattccctaaaaggatgaccctctagtgaggctgtcactaatgaggtgatctgatgatcctcaatagtgaccataacccctgcatggtgaccccaaatccagaagctctatccagcacaaactcagtgatgttttctcactcacaacagcatctcccattaccccatctctgtgaaggtgccagattccatcaccacgtggcagtttgtggtggtcagcctcaaggctggacaaggtgagccgcagcaagcccagtgccaagggaatgggggtatggtgaccttacccagcccctcccccaacggagcctctgcttaaacccaatgtgctctcctggctgtaggtctctgtgtctcggacccctttgagctgacagttatgaaatcgttctttgtggaccttaagttgccctcctccgtgatcaggaatgagcaggtccagatccaagccatgttgtacaatttcagggatcgccaggccaaggtgaagccccaagccctcaacttcctgccaaaacctctgctagtgtgtatttcattttattttttaatggctttatttcattttatttattttttgagacagagtttgctctgtcacccaggctggagtgcagtggcacgatttcggctcactgcaacctctgcctcctgggttcaagcgattctcctacctcagcttcctgagtagctgggactacaggcgccctgccaccatgcctggctaagttttgtatttttagtagagatggggtttcaccatgttggccaggctggtctcaaactcctaacctcaagtgatccacccgcctcagcctcccaaagtgctgggattacaggcgtgagccaccgcacccagcatattttattttatttttggaaacagaatcttgccttgtcacccaggctggagtgcagtgacgtgatctcggcttgctgcaatctcacctcacaggtgcaagcaattctcgtgcctcagcttccccagtagctgggatcacaggtgtgggccaccatgcctggctaatttttagtattttggttagagacaggattttgccatgttgcccaggctggtctcaaactcctaagctcaagtaatccaccctcctcagcctcccaaagtgttaggattacaggtgtgagccaccgtgtccagcctgttagtgtgttttagaaaaggaaattcagtgtatttttattcctatcggtcagtgaagtggtggctcttttggaaaatctaaggtattctcttatttagccaggcatagtgctgcacacctgcagtttcagctacttgagaggctgaggtgggaggatctcttgagcccagtaggtcaacgctgcagtaagctgtgattgcaccactgcactccagcctgggtgacaaagtgagaccttgtctctacaaaaaatgatcttaaaaaaattagccaggcttgatggcatgcacctgtggtgccagctgctcaggaagctaaagcaggaggatcgattgaacccagcagtttgaggctgcactgagttgtatttggaccactgcactccagcctgggtgacagagtgagaccaagaaagaaagagagaaagggagagagagagagagagagagagagagagagaaaagaagaagaagaagaagaagaagaagaagaagaagaagaagaagaagaagaggaggaggaggaggaggaggaggaggaggaagaggaagaggaagaagaagaggaagaaggaggaggaggaggaaagaaagaaagaaggaaagaaagaaagagagagagggagggagggagaaagagagaaagaaagaaagagaaagaagaaagaaaaagaaagaagaaagagaaagagaaagaaaaagaaagaaaaagaaagaaagaaggaagaagaaagaaagaatgaatgaaagaaagaaaggaaggaaggaaggaaggaaggaaggaaggaaggacggaaaaggagaaaagggggccgggcatggtggttcatgcctgtaatcccagcactttgggaggctgaggcgggcagatcatgaggtcaggagatcgagaccatcctggctaacacggtgaaactccatctctaataaaaataaaaaatttggctgggcgcgatggctcacgcctgtaatcccagcactttgggaggccgaggtgagcggatcacaaggtcaggagatcaagaccatcctggctaacacggtgaaaccccgcctctactaaaaaatacaaaaaattagccgggcgtggtggcgggcgcctgtagtcccagctactcaggaggctgagggcaggagaatggtgtgaacccgggaggcagaacttgcagtgagccgagattgcgccactgcactccagcctgggcgagagtgcgagactccatctcaaaaaaaaaaaaaaaaaattagccgggcatggtggcgggctcctgtagtcccagctatccgggaggctgaggcaggagaatggcatgaacccaggaggtggagcttgcagtgagctgagatcccaccactgcactccagcctgggcgacagtgcgaaactccatcaaaaaaaaaaagaaagaaagaaagagagaaagacagaggaagaaagaaagaagagaaagaagggggggagagagagagagagagagagaaaaagaaagaaagaaagaaagagaaagagagagagaaagaaagaaagaaagaagaaggaaggagggagggagggagagaggaaggaaggaaggaaggaagggaagttaaacctcacaacaaccccatcagatgggtactattattgttcttggtttacagatgaggaaattgaggcacagagaggttaaagggcttgcctggagtcacacagcacataaatggcagatggggctctgactcaggctgggtctgtggtcctcatcactaggctttgctgtcacctacgcaggcatctcagggtggggaggggactgtgaccctagggtcctggaccacaccatacatagataccccatccctttgcccatcctgccctaggtccgagtggagttcccccacaaggagacactgtgcagtgcgtcaaagccaggagcaccatcccaccaggtagtggtcgtgccccccacctcctccaagatagtacactttgtgcttctccctctggagacaggcaaagtggacgtggaggtcaaggctgtgggctacggggtccaggaccatgtgaagaagacactcttggtccgggtaatgggcactcccaactcactagctgctggtgcagacagcggggcttccaccaggtccaggctgggcaggtgggcccaggatcgataagcaaggctcctagatgggagtgaggtgagaaagaacagatttgaaagttcagtcagttggctgggcatggtggctcaagcccgtaatctcagcagtttgggagaccaaggtgggtggatcacctgagggtaggagttcgagaccagcctggccaacatggtgaaactccaactctgctaaaaatacaaaaattagctgggcatggtggtgcacacctggagtcccagctactcgggaggctgaggcaggagaatcgcttaaacctgggaggtggaggatgcagtgagccaagattgcaccactgcactctagcctgggcaacagagcgagactcggtctcaaaaaaaaaaaaaaaagaaagaaagaaaagaaaagaaaaaaagaagaaaaaagtttagtcagtggactgatgtgagggggtcaggtcacaagcccccacttgagagttttggagtcaggcctgggttctaatcttgtctctgctgtgtgaccttgggcaacttacttaacttctctgttctgagcctccatttccttgcttgcaggatgaggataatcatcatatccctgaataaacatagagctgggaaaatgacccagaaccagtgtatggcctatcaaaaacattttattagactgggcttggtggctcatgcctataatcccagcactttgggaggccaaggcaggaagattgcttgagcccacgagtttgagatcagcctgggcaatatagcaagacctctctagaaaaaaattaaaaattagcctgacatggtgttgtgcacctgtagttgcagttactcaggaagctgagggaggattgcttgagcccatgagattgagcctgaagctgagatcacgccactgcactccagcctgggcaacagagcaagaccctctctctaaaaaacaaacaaaaaactttatttgcttaacaaacacatgtttaacacttaagatataaatgcttaagaatattaactcgggccaggtgcggtggctcacacctgtaatcccagcactttgggaggccaaggcgggcggatcatgaggtcaagagatcgagaccatcctggctaacatgttgaaaccccgtctctactaaaaatacaaaaaattagctgagcgtggtggcgggtgcctgtagtcccagctactcaggaggctgaggcaggagaatggcatgaacctgggaggtggagcttgcagtgagccgagatagtgccactgcagtccagcctgggcaacagagcgagactcggtctcaaaaaaaaaaaaaatattaactcagtcaggtgtggtggcaccccgccccccccccccccccccggtattcccagctatttgggaggctgaggtgggaggatcatttgagcctagaaattcgagtccagcctgggcaacctgaagtttttttttctctggaaaaaaaattaactaggccaggcatggtggctcatgcctataatctcagcactttgggaggctgaagcaggtgaatcacttgaggccaggagtccaagcctggccaacatggcaaaaccctatttctactaaaaatacaaaaattagcctgtcttgatggtgtgcacctataattccagctactcaggaggctgaggcatgagaatcccttgaacctgggaggtggaggctgcaatgagctgagatcgtgctactgcctccagcctgagtgacagagtgagaccctatctcaaaaaataataataataactaattcagccctccaaacaaccctatgagtgagggactattcttatccccctttgatatatgagaaaactgaggcagagagagggtaactaattttcccaaggacacacagctaggaagcagaagagctgggattcgaacccaggtatttgggctccagagtctgtgcttatcacagccaagcaatgcctcctctcaccatcactgcgattgtcattctgactgtgattgctgtttttgcttttgacttatatcctcatctcatccctcaggcaggggttcagatccagcaaacgtcctatagcatcgtcctggaaccccaaggtttgtgagatctgcagggggcctgtgagatcctggggctgtgctagggaggaggaagcagttggcatgaggggatatgctcagatagggattctgagccccagccccgggctctgtgcaccctgacttccccagccccagagcccacttgtcacagaaggttgtggttattcaggtcagacccagacaaaactggtgccaagacaggagttcttgaacatggtacccgacacggaggcggaagtgtttatcagtgttcaaggtgctgggggacacagggacatggggagggctgacgctgggttctctaaggtccgtgaggcaccagagcaggaggagccgtgtggggcgatcagtaaaccactgtggcttaagcataggccactcccagggtgacccaactcacccacctgacaggtgacatccttggtgagacaattgtgggcagcctgacacccagtgagattcagcagctgctgcgggtccccacgggctgccctgagcagacgctgagctccctgacgcccgtcatcatcctgtcccgctatttggataccaccggccagtggggcaaggtcggggtggagcacagggaccaggtgatgaagaatattgtcagcggtgagagcggggaccctcctggggcctccaagagggtgcctggggatctcccggagggtggctggggcacccccaggattggggaaatcttcatgggaccccccagcccccgcctcaggcattaacacccaaactatgactccttccccagactacaacctgataccaattccccaacgtcatcccccagctgtgacacacccatgggaattcttcacctgaccactttcccaggctttaatctttttttttttttttttttttttgcaatggagtttcattctgtcacccaggctgaagtgcactggtgtgatcttggctcaccgcaacctccgcctcccaggttcaagccattctgcggcctcagcctcccgagtaactgggattacaggtgcccgccaccatgtctggctaatttttgtatttttacttttatttatttatttattttgagacggactctcactctgtcacccaagctggagtgtagtggcacagtttcggctcactgcaacctccgcctcctgagttcaagtgattctcctgcctcagcctcctgcgtagctgggattacaggtgcccgccaccacactcagctaatttttggatttttagtacagatggggttttgccatgttggccaagctgctctagaactcctgacctcaggtgatccacctgccttggcctccctaagtgctgggattacaggtgtgagccaccgcgccagacctccaggcttcagtcttatgacagacaccctgatttctcccaaaaagccatcctgcgagaggatgttatactcaggccctgccccaggttacaccccctcagtgccactcccagggaaccctagggaacacccaagcagcaaaccccagaataaccccaggcagtgggctcttggttgcacctgtatgctgatacttccccaggttacaaccacacaccctagggagcaaccagagatgaacacccctagtaacacccatagacctctgagttaattggtcccaggttaccctcagactccaactttccctccaggttttctcaagcagtaatcccacaggtaatgtccagatactgtcaccccaatgctccaagcaaacagtaaacctccaggggaacttcaagtaatacccgagtagcgaggctcagaatacacctgaaaggctgggtgtggtggctcacgcctgtaataccagcactttgggaggccagggcaggaggatcacttgagcccaggagtttgagatcagcctgggcaacatagtgagacccccatctgtacaaaaaatttaaaaattggctagatatggtggttcacgcctgcagtctcagctactcaggagcctgaatgggaggattgcttgagccccagagtttgagactagcccgggcaacatagtgagacttcatctctaaaaaaattagcctggtgtggtggcacatgcctgtagtcccagctacttgggaggctgaggtgggaggatagcttgaccagggaagggcgaggcttcagtgagctatgattgtaccactgcactccagcctgggtgacagagtgagacccagtctcaaaaaaataaaaataaataaaaagagggccgggcatggtggctcacacctgtaatcccagcactttcggagaccgaggcaggtggatcacctgaggtcaggagttagagaccaccctggccaacatggtgaaacccagtctctactaaaaatacaaaaattagccaggtgtggtgacgcatgcctgtaatcccagctactcaggaggctgaagctggaaaattgcttgaacccgggaggcggaggttgcagtgagccgagatcacactactgcactccagcctgggcgatagagcaagactccgtctcaaaaaaaaataaaagaaaactcccacgtagcacccctcaagttgccccatctcccaggttgcatgtggacaacaacaccttctatgatttcttccagcagcaactccaagggtagcatgccctgctccagagaccctgaggtgaaggtttcctgggttacacccagagacaactgcatcctgggtccctcaaagtcattcctgagccctgctcctcacttacatctgggccctaaacacccctccaaagtacacctggacaacaggtctccccttctagattacctgtatgtgtgacacccccgtgtcacctctagtccctgcccgccaggttattcctgataacactgactgtccctcaaagccctgctctgtttccccaggctacactcagatgctgacccaccggagttcagacggcacctaccacacctccaaggggaacccaggaagcacttggtgaggatgaccctatctctcctgccactgccaccctggaagcccaagggtccagcctggggtctgatgacccaggagcacccacgctgtagagtcatggggtcttggggtgtccagcgcacggccctggggcattctacactggcagacctgggcagcggcgaatgacaggggtccacctggaatggtgtggaccatggtgtagactcccctatcccagagcccccttgactgcggttcgcaggtgtcacttttgccctctcctgacaggctcacaagctatgtgttccgcgtctttgccctggcctactctatgatgacgacccaagtgcttagcctgtcctctctctgtgacatggccaactggatcatcatcgacaggcaggcagaggatgggcacttcctggagaagggccctgtggtcatgacatccatgcaggtgatcacagccctccctgcctgggccattcaaacaaatccgagggactctgtgcactaagagggggatttcaggctcccaatctgttctcgggcagaatgagaacaggaaagagctgaggctcagcgccaaggatcacatcccccccggtctgaaccacctcatactctgttagaatgtgggtgaggctgggcatatctgggaacccatctcttcttcatccccacatcaagcagtggctcgccctggccctcctccctcaggaactgagtcctccccagcttgcatacccatccccaccaagagtcccctcacaccagcgtccagaaatgtctttcaaatgcagcctggcaggtctctcccctgttcaaacacctgctgtggctcacagctatctttgtctgtatcacctcctaggcctcacctcacccctcccttctcactattcacacttaaccactcacgggctcctccaactctcctccaaaaagcgcttttgctgccctctctgcatgcaccaggccaaattattattattattaattttgagacagagttccactctgtcacccagactggaatgaagtggcatgatctcaactactgcaacctccatctcctgggttcaagcgattcttatgcctcagccacccgagtagctgagattacaggcatttgccaccacatccagctaatttttacatttttgttttagtagctggggtttcaccatgttgtccaggctggtctcaaactcctggcctcaagtgatctgcccacctcggcctcccaaagttctgggattacagacatgagccacggctggagtgcagtagcatgatctcggctcactgcaacctctgcctcctgggttcagcctattgttattatttttagggacaggatcttgctctgtcgcccaggctggaatgcagtagcttaatcatggctcattacagcctcaaacttctgagctcaagagatctccctgccttagcctcctcagtggctgggactacagatgcacaccaccattcctggctaattttttttttttttttttgagatggagtcttgctctgttgcccaggctggagtgcaatggcgcaatctcggctcactgcaacctctgcctcccgggttcaagtgattctcctgcctcagctccccaagtagttgggactacaggcacacaccaccatgcccggctaatttttgtagttttaatagagatggggtttcaccatgttgaccaggctggtcttgaactcctgacctcaggtgatctgcccatcttggcctcccaaagtgctgggattacaggcatgagccatcacccctagcactgacatgatcttctttttttttgagacggagtcttgctctgtcgcccaggctgcagtacagtagcacgatctcagctcactgcaacctccgcctcctgggtttgagcgattcttctgcctcagcctcctgagtaactgggactacaggcaagtgccaccatgtccagctactttttgtatttttagtagagacagggtttcaccatattggccaggctggtctcgaactcctgacctcgtgatccatccccccacccccccggaaccccgccccttggcctcccaaagtgctgggattacaggtgtgaaccacagcacccggattttttttttttttttttgaaacagagtcttgctctgtcgcccaggctagagtgcagtgatgcaatctcagctcactgcaacctccgcctcccaagttcaagcgattcttctgcctcagcctcccgagtagctggaactacaggcttgtgccaccacgcccagctaattttttgtatttttagtagagatggggcttcatcctgttagccaggatggtctcgatgtcctgacctcatgatccacccgcctcagcctcccaaagtgctgggattacagacgtgagccaccacgcccagccgacatgaccttataaggacaccagttattagacttagggtccaccctaatccagtatgaccttttcttaattttaattacatcctcaaagacccaatttccaaataagatcacatcttgaggtcccaggtgaacatgaattttggggtcactattcaagtccagagaggggaagagggtggaagccagggtactaaagtggtgtttggaccctgagttggccattttctagcaatgggaagactttgccactctgacctctgttttctcatcagtaaaatggggctgctgctagaatgctctgagatggtctacagagctcagcttcttgtgttgatagctttttgtttgtttatttgttttgttttgttgtttttgagacagtctcgctctgtcgtccaggctggaatgcaacggtgtgatctcagctcactgcaacttctgcttcccgggttcaagcgattctcctgcctcagcctccccagtaactgggcttacaggcacccacatcatgcccagctaatttttgtatttttgtagggacagggtttcaccatgttggccaggctggtctcaaactcctgacctctggtgatcctcctgccacggcctcccaaagtgctgggattataggcatgagccactgcgcctggccgatatcttttgttagtagggcagaccccagggaggcaaacctctcctctctgtcttcatcccacctccaccatcatccagcccagagctgggtacctggaaacttctcagggtcagacaggagaggctgaggaaggcatctccaagacgctgagggaatcacagatggaactctgcatccacaggatggctaccaaggctccgaggaggatgtatccctcacagctcttgtcctaatagccctgaatgagggaaaggagttgtgcagacagaaggtaggaccccagagaggagggcaggatctgtaaggtcctctagccccagcatctggaaagctcccccaccctcacatccctctgggtccctctaactcccagacttctttcctctgatcatctccctctggcccctccctctggccctctagaatttgatggccagcatcgagagagcccgtggcttcctggagagaaaacttcccgacattcagacaacctttgccgtagccatagcctcctatgcactggcccttgccaacagctcccaagccaacgactgcctggacagctttgccagccctagtgggtgtgggatgcttcttaatcaacctcagtcatggagtggggagggggtgatctcaaatccagcaatgtgttattcatcacttagtgtttcctgagcatccactgtgtatcacctcctgagctcagaccctgtgagaccaaggtgagcaacactggtaagttccctgccctcaagggtcccaccgtccttggaagagacaatcagaaggtcactatataattccaaactgaggcttggagcagcggctcacgcctgtaatcccagtactttgggaagccgaggcaggtggatcacccttggtcaggagctcgaaacaagcctggccaacatggtgaaacctcgtctctattaaaaatgtaaaaattagctgggcgtggtggtgggtgcctgtaatcccagctacttgggaggctgaggcaggagaatcgcttgaagccaggaggcagaggttgcagtgagccaagatcacaccactgcactccaccctgggtgacagagggaggctctatctcaaaataataataataattccaaaatgagacaagcactgagatgataacacacaaggtgggtgggagagatggcaaggggaggggagtacaggttggagggctgagatgaaagatggaaagacatacctgctaggtgtgatggctcatgcctgtaatcccagctacttgggagtctgagacaggaggatttcttgaggccaggagctcgagaccaatctgggcaacatagtgagaccccatctataaaaaaagtttgcaattagctgggtgtggtggtgcgcacctgtagtcccagctagtagggaggctgaggcaggaggatcacttgagtccagaaagccaaggctgcagtgagctgtgatcatcccactgcactccagcctgggcaatagaccaagactctgtctctattaaaaaaaaataaaaaaataaaaaataaaaaatagaaacttttttttttgggacggagtctggctctgttgctcaggctggagtgcagtggcacgatcttggctcactgcaacctccatcacccgggttcaagcgattcttctgcctcagcctcccaagtagctgagattgcaggcatccaccgctgcgcctggctaatttttgtatttttagtagagacggggtttcaccattttggccaggctggtctcaaactcctgatctcaggtgatctgcccacctcggcctcccaaagggctgggattacaggcatgagccaccgtgcccggccaaaaaaaaattatttatttatttttttatttattttgagacggagtctcgcactgtcccccaggctggagtgcagtggtgcgacctcggctcactggaagctctgcctctcggcttcatgcccttctcctgcctcagcctcccgagtagctgggactacaggcgcccgccatgacgcccggctaattttttgtatttttagtagagacggggtttcaccgtgttagccaggatggtctcgacctcctgatctccacccatctcggcctcctaagggctgagactacaggtttgagccaccgtgcccggccaaaaaaaaaaaaaaaaaaaaaccctttttaaggcacaccttcatgaaaggccatggacatttcaagcaaagggaacagcacaggcaaacaccctgaagtggaaagagtgcttggtgttgtcaaggatggaaaggttataaaaccttcccatgggccgggcgcggtggctcatgcctgtaatcccagcactttgggaggccaaggcgggcagatcacttgatgtcaggagtttgagacaagcctgctcaacatgacgaaaacccgtctctactaaacatacaaaaaaaatcagccggtcgtggtggcacatgcctgtaatcccacctactcgggaggctgaggcaggaaaatcacttgaacacgggaggtggagtttgcagtgaaccaagatggcgccactgcactccagcctgggcaacagagtgggactccatctcaaaataaataaataaataaataaataaaaatttaaaaaaaatcccatggctgatgctatctcatccccaagggtccatatcccatcttccccattctgcaagtcaagcaaagtggaactaggaaaatttgcttgcaatgggactggagggacctgaaggaattttttttttttttttttgtcatccaggctggactgcaatggcacaatctcagctcactgcaacctccacctcccaggttcaagtgattctcctgcctcagtctcctgagtagctgggattacaggcacccaccaccacacctggctaatttttttgtatttttagtacagacagggtttcaccatgttgaccaggctggtctcgaactcctgacctcaggtgatccgcctgccttggcctcccaaagttctgagattacaggtgtgagccaccgcgcccagccaggaactttttttttgaaactcaatttcccgatcggaaaatagagtcccgtttcccagggtcattctgaaaattggatgtccacgtttcctcagcaaagagcttcacataaagtaggtgatcaggactgggcatggtggctcacgcctgtaatcccaacactttaggaggtcgaggtgagagaatggcttgaagcctcccggcctcaagaccagcttcgacaacataatgagaacccccccaacccccactcccccatctctacaaaaaataaaaataaagtaggtgatcaataagatggcagatgagaaaactgggccagatgacacaaagagagggcaggttaaggtgggtgggcccagctctgggtgacaaggcgggcgtccctgtttctagacaaaacccactggccagtggatgagcagaatctgggctccctgtacaccattgaggccacagcctatgggctcatgcagaagctggagctgggccggtacaatgagacacacgccatagccaagtggctactagagaagcaggagctgggaggaggcttcaggtccacccaggtgatggggacccccgggaggtgagggccagagtcactagccgaagtgctgactcgcccagcccgacgggggagtgtgtgtgtgtgtgtgtgtggggggggggggctgtccgtggtgctgacacgccggccgatggtttctcgagtgctgtctgtggtactgatccacgttcccccacctccccgccccattccaacactcagaccacggtggtggcccttgaagctctgacccgcttccgcgaagctgtccccttcaagggcatccaggatctccacgtccagatcagagcccccaagacagccctgaatgtgaattggtacattgatcacagcaatgcctaccaacagcggtcagcaaaggtatgtcactgaggggcaggccagagtccacgcagagatggcactggagatgaggccaagcatcatgtccctgctgatctccctcctcaagacatacctcaagatatgtggctatactgtcaatgtattgattcatctattccatcaacatttcctgagcatctactatgtatcagcgactctcctaggcattggggttatgttatgaaagatccatggtccctgttcttatggaatctagaagagtccctaagatctagaagaaaatgggccagatgccatggcttacgcctgtaatcccagcactttgggaggccgaggtgggtggatcatctgaggtcaggagttcgagaccagcctggtcaacatagtgaaactccatcctactaaaaatacaaaaattactcgggcatggtggtgcatgcctgtaatcccagctactcgggaggctgagacaggagactcacttgaacccagaaggaggaggttgtagttacctgagattgcacctgagtgacatagtgaaactccatctcaaaataaaaataacaataaataaataaatgaaaagaaatgtcaccctgggcaacatagcgagactccatctctactaaaaaagaaaagaagaagtaaatcaactcatctaagctcatgcattgtttagtggatgtccctggataaatagttgtcaaaatgaagaaagcagagggaggggaagagtgtttctttttattgttgttgttgttgttgagacagagtctcactcagtcacccaggctggagtgcagtgacgtgatcttgcctcaccgaaacctccatctcccgggttcaagcgattctcccgcatcagcctccccagtagctgggattacaggcacgcaccaccagcccagctaatttttgtagttttagtagagatggggtttcaccatggtggccaggctggtctcgaaatcctagcctcatgtgacctgcccacctcggcctcccaaattgcagggattacaggcatgagccaccacgcctagccaaggaagagtgtttctgacatagggaacagcatagagtgcagacccggagccagtcaggcacaggaatggtcagaagggagaacagcaaataaagcaggctattaggaggcttgcaggctggcagagctcagcagtgagggctgggaggccatggcaagaattaggacttatcctataggcgataatatttgatcctataggcaatgagatttgagtgattgtgactttttttctttctttctttctttttttgttgttgttgttttttgttttttagagacagggtcccactctgttgcccaggctggagtgcagtggcacaaacatagttcacggcagactcgaattcttgggctcaagcgatcctcctgccttagcctcctgagtagctgggactggacatgcattgcaatgcccgacttaattttcaatttttttggtagagatggggtctagctaaattgcccaggcatgttttgaactcctgggctcaagcaatcctccccacttggcgtcccacactgctgggattacaggcatgagccactatgtttggcttggctgtgaatttttaaaattttattctggctgatacaagtagactataatgaggaaaacaagagtagctgcagatgaagatagagattagattggtggttgccagaggataggaagtgtacaaagaaagggagggatgaaaagaagttgattaatgggtacaagcatacggttcgatagaggaaataagaccgagtgtttgatagattcataggatgaatatagtttacaataatctattgcatatttcataatagctggaagaaaagaattagaatgattttagcataaagaaaagacaaatatttaaggtgatggatatctgaggtacactgatctgatctttacacattatatgagtgcattagattatcacacgtgccttgaaactatgtacatccattatgcatcaatttttgttttttgagatggagtctcactctgtcgcccaggctggagtgcagtggcacaatctcagctcactgcaggctccgcttcctggggtcaagcgattctcctgcctcagcctcccgagtagctgggattacaggcgcctgcctccatgctcacctaatttttgtattttttagtagagacggggttccaccatgttggccaggctgctcgaactcctgaccttaggtggtccacccgcctcggcctcccaaagtgctgggattacaggcatgagctactgcacccagcccattatgcatcaattttaaaaggcaaagaaaaataaagagaggtgcagaggtgccagtgagaaggggctcatgggagctccatgcacagggaaccttggaaatgctccaaagagaacagattccagggatgcacattaggacacagcctgaactgagccgtgcagatgatctgacgtcaggagttcgagaccagcctggcaaacatgctgaaaccccatctctacgggcgtgacagcacaagcctgtagtcccaactactcgggagactgaggcaggtcaggagaattgcttgaacccaggaggcagaagttgcagtgagccaggatcacgccactgtactccagcctggacaacaaaatgagactctgtctaaaaaaaaaaaaaaaaagacagccttagactggacatggcagctcacgcctgtaatcccaacactgggagtccaaagcgggtggatcacttgaggtcaggagttcaagaccagcataaggaacatagttagatcttgtcactacaaaaaaatacaaaaaaaaaaaaattagccaggcatggtggcacacacttgtagttccagctacttgggaggctaagacaggaggattgcttgagcccaggaggcagagcgcaccaaagtgagccaagatcgcaccactgtactccaatctgggctacagactgagacctggtctcaaaaaaaaaaaaaatacacaggctggatgagcagttccagttgatctatgatagtgtagacaccacaaatgctctctgaagagggaaaagcaaaaccatctgcgtggagagagatggaaaatgaatcaccaggtcccaggttagggaaaaccgaggccctggtgagtgttcaggctccacatccccctacacttgaccctcactttgctgcttcctccacccttaaatcttcctctttgttctcttcagttccttgcccaggacgacctagagatcaaagccagtggcaacgggagaggcaccatctcggtaggtcttgtattctactgtattagtctgtttaggctgctacaacaaaatagactgtgtggcttataaacaacagaaattggcccagcatggtggctcatgcctgcaatcccagcattttgagaggcccaggcaggagaatcacttgagtccaggagttcgagatgcaccagggcaacagagtgagactctgtctttacaaaaaattgaaaaattagatgggcatggtggcacatgtctatagtcacagctactcaagaggctgaggtgggaggattgcttgagtccaggaggtggaagccgcagtgagtcgtgatcaagaccttgcattctaccctaaatgacagagtgagactctatctcaaaggaaggaaggaaaagaaagagaagaaagaaaagaaaggaaagcaagaaagcaagaaacaaagactcggtgcagtggcttggctgggcatggtggctcacgcctgtaatcctagcactttgggaggccgaagagggaagatcacctaaggtcaggagttcgagaccagcctggccaacatggtgaaaccctgtctctactaaaaatacaaaagttaaccaggcatggtggcggtcacctgtagtcccagctacatgggaggctgagacaggagaatcacttgaacacagaaggcagaggccaagattgagccattgcaccctagcgtgggtgaccagagcaaaactctgtcagaaagaaagaagaaagaaaagaaagagagagagagagagagagagaaaagaagaaagaaagaaaggagaaagaaagaaaaagtgagaaagaggaaagaaagaaagaagaaaaagaaagaaagaaagaaaggagaaagaaagagagagaaatttattgctcacagttctggaggctgggaagtccaagataaaggcagggtacactctctgtttcaggccgggtgtggtggctcatgcctgtaatcccagcactttgggaggccgaggcaggcagatcacaaggtcaggagatccagaccatcctggctaacgcggtgaaaccctgtctctactaaaaatacaaaaaattagccaggcgtggcggcatgtgcctgtattcccagctgctggggaggctgaggcaggagaatggcctgaacccaggaggtggagcttgcagggagccgagatcgcaccactgcactccagcctgggcaacagagcaagactctgtctcaaaataaataaataaataaaataaaataaataagtaatctattatactcatattattatttatttataacctaaataaataaatataggccagtcagtgtgattcatgcctgtaatcccagcactttgggaggctgagtgctgggatgacgtccatgactttttttttttttttttgagatggaatctggctctgtcacccaggctggagtgcagtggcacaatctcggctgactgcaacctctgcctcccaggttcacgtgattctcctgcctcagcttcctgagtagctgggactacaggtgcacagcagcatgcccagctaattttttgtatttttagtagagacggggtttcaccacattggccaggctggtctcaaactcctgacctgaagtaatctgtccgccttggcctcccaaagtgctgggattacaggcatgagccaccatgcccagcctgacgtccatgacatcttccagccccatgacgtatacccgggaggacagctcttttgttaaccaaaaggtggcctggtgtcgtgttccagacaatggagtcatggctgaatctctgcctttgttatgtgaccctgagcaagtcatacctttcttcaagcctctgtgaaatctaagtttaaatgggttaaaattaaacaaaattcaaaattcagtttctccgtcgagctagccgcatttcaagtgtttggtagccacatgtggctaatggctgccatactggacaatgccaattgggaccatttccgtcactgcagaaagttctatgacacagagctggtctagactccagacactgctctggccactgcacctaggaattgatggggtcggtgggggcaatcttgcagtaaattccccacatggccagagacctgggaagtcaaggattggggtgcagaggaaaggcagtgggtggggaagggctctgacagccccctttcctggcccggcagatcctgacaatgtatcacaagtccccagagtcccgggaggacaactgcaacctgtaccacctgaatgcgactctccacagtgccctagaaggtaagcctggtgtggctacaggaggagtaagggtagagttttaggagaagaagttggaaaggtgatgggggaagatggtgtagggacttgttagccacagtgaggactttggcttttgttctgagtcaggtggggcatagaaagttcccaacggaggaggagtgtgacctggcacaggtctgcacaggctccctctgatctgaccactctagagggtgagggtgggagccaggtgaccaggaaggtgactgcactggtcctgcaggagatgatggaggccgggccagattaggggctctggagatgatcagatattagtgggccgggcacagtgactcatgcctgttattccaacactttgggaggctgaggcaggaggatcacttgagctcaggagttcaagaccagcctgggtagcatagtgaaactccatctctacaaaaaattagctgggcatggtgatgcatgcttgcggttccagctactcaggaagttgaggcgggaggatcatttgagcccgggtggaggctgcagtgaaccatgattgtgccattgcactgtagcctgggcaacagagtgagaacctctttcaaaagaaaaaaaaaacaaaaacagagaaatagttggattccacagttcccagcctggggcaccaagaaggagagaggactattgggagctcactgtgggagtaagaggaacaaccctcaccagtcccatgaattttagggactaaacctcaccaaggttttggtttttgcttgatctcttaataataataacaataataataatagttacaaagcactgatcaggcaccatgctgagggctttacttgtattaacttatttaatcctcacatcaatcctgttgggttgggaatattatgatccccccttaaggatgagtaaactgaagcagagagaagttaagcaacttgctcaaagtcacacagcagagtcaggatttgaatccaagatgctagctccagagactgtgcacttgattactgtgctccccagcctctaaactgctgccttctctctgcagaaaataaaaagggaggtgagacttttcggctccggatggaaacaaggtcagcgcaccaggatcttgaactgggagggaggagggtctcactttccggtatctagattccttagcggccttccccgtgtactgagtggacagtgggaaccagccaagcttgcctctccatgcctgtcccccattctgtacctgcctccttccatgtctgcatgtcctcatatgacaggctctacctcagctgacatgctccatgactcagatgcccagagctggctccaagccctgaagctctccccgtggttctcattttctccgaacatcccagcccccaccccagtcctgccctgtcccatacctcccttgcccaggtctgcttcagatagaaacattattgggcacctactgtgtgccagaccctgttcttggagctagggacccagctatgagcaaggcagcctctccctgccctggcgaagcccacagtctatcaggagacacacacaatcatcaaataatcacacagaaccaataatgaaatggcagtggtgatttcatgtggcaaaggagaggtttacagagtcatgagaggcaaatcagagaatgatctgggcctggtgcggtggctcatgcctgtaatcccagcactttgggaagccaagaggatcacttgagcccaggagtttgaggccagcctgggcaacacagcaagacctcatctctaaaaaaaaaaattcaaaaattagctaagggtggtaatgcatgtctatagtcccagctactcatgagcctgagactggaggatcacttgagcccaggaagctgaggctacagtgagccatgattgagccactgcactccagcctgggtgaccctgtctaaaaaaaaaaaaaaaatgatttggtgtgtggggtgtaggttggggaaggcttcccagagggagtgatgtatccgctgagatggaaaacatgaggggtgtttcaggatgaagaggcagaaacgaagattccaggctgagtgaacagcatgtgcaaaagtctggtggcaggacagggaacaaggctaacagtgatcaaatggaggctgaggtgggaggaggtgatgtggaagggtgtcaggattgaggcaaggcatttggtaattgaagcaacgaggcaaggtagtcagatttctgcttgctaaagctctgtgttgtgagtggcaaaggggacatggggagacctggaaggaggctactgcgctggtccaagccagagacaacagcagtggggagcatggagagagaggcgggaggatagtggggaaagactggggctgtgaacttccaggttccagaacaattgagaggccacaatgactatcatggaggtctccctgctcacgggcttctaccccaaccaggatgacctcaaacaggtaatgcagaccccacctacctgcttcctgagcaaccttcccatacttcccacatgggtgcagggcagtgtctactcaaagcaaggcttctgggttaatgccccatcgttacttctctgcatggccaaaaccaaacttttccctggttgggcctcagtttcccctagcatggggttgattggacaaaggctggagctctagggctacgggccttggagactgtcagccaccctccagtctccaccctctgccccagctcacgagtgatgtggagaggtacgcctttcagtacaaaaccaagacaagtaccagcgacagcactgttgtcctctacctggaaaaggtgagaggggccgggtgccctccgccagaggtgtgtgggtaccctgggggctggagaacccaaggtcggtcccctgggtgggttttgcagagagccaggccctctcaggtcagctcctccagttgcgatccctgtggtcaaggccacatggtccgtggtcatggccaatgccaacagccaaggcctcgtggtcagtgccacaaggtcagtgccccagtcagtggccctggccggctcagacaggactctgttctctccagctctcccatgagaagaacacggtgctgggctttcgggttcacaggatgctgcaggcggagttcctgcaggccgccctggtcaccatctacgactactacgagccttgtaaggaggggcccccgtgcatggggatgaggcctgcaaaggacagagccaggtgccaggcgaggagagaccgggcattgcgaaaagggggctgggcctggctagacataaggggcgaggtcttattggattgacctaggttggcggggacaggaaggagatggggcaaagttgaagggggactgggcgtggcctgctgggaatggatggggaaggggcaggctcttttgagtgggcgtggcctgttgacagaggtggctggccagggcccttcaaagtgaggtttgtagggggcagggccaggaagaggggaaggtctgggaggacctggagggcgcagcccagggacaaggaggggcaggagggagcctggactttggaggatggggaaggcaggccagggcccggagtgggtgaagacttctcaggactaggccaggtaggcaacgaacccccaggaacactggcccaagacaacgccctcccccaacccctgcaccctccatccacagcccggaggtgcagcactttctacaacctgcccacagagcaatcttccctgagaaagatctgccacaaagacatctgcagatgtgcagagggtgagatgtgccgagggtgagccccatgccaccaggctggggctgccaggttgtggggggcggatccaggagcccttcaagcctcctcctggctgtagtctggcctgagtttagacagaaagagaaagagacagaggcagaggcaaagagagacagaaagaaggcacagagagacaaagcttgtcacacacacatactcgcactgccaaagatcaaatgacacggagacagagagaaagacacaaagagacgaagacgggagaaatagacaagaaagtgaccaaaaagagagacagacactgggcatggtggctcatgcctgtaatcccagcactttgggaggccaaggcgggaggatggcttgaggccagaagttccagacaagcctgggcaacacagtgagaccccatctctaccaaaaaatttttttaaaaaattagccaggagtggtggtaagtacccgtagtcccaaatacttgggcggctgaggcggaaggatcaggagttggagactgtagtgagctatgcttgtgccactgcactccagccagggtgatacaacaagaccttgtctcaaaaataaatttaaaaagccgggctcagtggcttacacctgtaatcccagcattttgggggccaaggtgggtggatcacttgaggtcaggagtttgagaccagcttggccaacatggtgaaactccatctctactgaaaatacaaaaattagctgagtgtggtggtgcatgcctgtagtcccagctactcaggagaccgaggcatgagaattgcttgaacctgggaggtggaggttgcagtgagctgagatcacagtgcattccagccagggcaacagcacgagactctgtctcaaaaaataaataaataaataggccaggtatgatggctcacacctgttgtcccaacactttgggaggccgaggtgagaggattgcttcagcccaggagtttgagaccagcctgggcaacatagtgagagaccccaactcttaaaaatataataataataagagagagagagaagaaaaagaaaggaaggaggaaggaaaaagaaaagaaaaagagagagagagagacagagagagagccccacagaccagaagggccagatccggagacccaggcctgggggctgaagggagggagggtggggggtgattgggaggaagtgccctgtcccagcaccgccagagcagctgccctcctgaccctgcaggacagtgcccatccctgcagaagcccagtggccaattgaggcaggaggagctccagacaacagcatgtgaggcaggcgtggattttggtgagtgtggggagccacaggggacaggcagagcccacctgcaggccgaatgccaacatgacaccctccccttccccagtgtacaagacaaagctggaatctgtggaggtctctgcctccaacccttacgtctattacaacacgcagctcgaagacatcattaagagtggtatgtcccaggtgacaaagaaggaatcccagtgtggggtcaccctgggggcccaccctgggggtcccattgtgtgggagggtcagacctgtgtatgtgcacacaccgggttttctccaggtacggaccctgccacacccctggccatgaagaaattcgtctcccatgccacttgccatgactccctggggttgcaagaacaggaatcgtacctcatcatgggccagacgtcagacctgtggagaatcaaatctgagtgcgtgaggggttccacctgtcctggggactcaggcctgggccttcttgcctaccctcaacccagccctcagttccacaatttttgctggagatttcaagcaattctcctgcctcagcctcccaagtagtagctgggactacatgcgtgtgtcaccacactgggctaattttcgtattttcagtagagacagggtttcatcatgttggccaggctggtcttaaaactcctggcctcaagtgatccacccacctcggcctcccaaaatcacggggttgcaggcgtgagccaccgcacccggccagggaagcatttactaattcccagtgatttggactaagaggctggaagatcagagagggccctcgggtgtggacactacaggctaaggctctggcaggctgtcagacagggcagggaggtccccatatccccaggggcaccaggctctcctcaccttcttgcttcttgtaacccacagttacagctatgttctgggcaaggagacgttcctcatcctttggccagcagatggagatgccagcaagaaagaattgcgggaccaactggaggaatttttggaatatatgcgcacccacggctgccagtcctgagcctcttctgctttcagggaggtgtcatcaggcagctctgggccactgggtttaaccccaaataaagagcacaggatatgacacccaaaccctggacatttgtccctgtgtcagctttcaccaggggacctgcacaacctgctctggcataatgtggacctgtctcctccctcttcccctgctacttgggcggctgaggcaggaggatcacttgggagctggctctccaagagtcaatattccaagagaaggagcagagggagccatagtaccttttatgacctagcctcaggggtcacatgccatcatttctgcaacgtcctattggtcacatgagccagtattattcagcatgggtggagactacacaaggcatgaccactaggaggcagggttcactaggggaataaatttcagcaggccatggtatccaatccatttaatgtgctgctggatttggtttgttaacattttgttgaggatttttgcatctatattcataaggaatattggtctgtagttttctcttcttgtggtatcagtgtctggaatgctggccccatagagtgtaaaagaaattaagaaatattcttgggagccatggtggctcaggcctgttgtcctggtgcacaaggaggcaaggctagaagtttgaggccaacctgggcaatataaaaacctctcgtctatataacaacaacaataaaaaaactagccagcacagtggctcacgcctgtaatcccaacactttgggaggctgaggcaggcagatcacctgaggttgggaattcgagaccaagctgaccaacatggagaaaccctgtctctacttaaaatacaaaaaaataagccaggtgtggtgatttgcctgtaatcccagctactcgagaggctgaggcaggagaatcacttgaaccccggaggcagaggttggagcgagccaagattgtgccattgcactccagtctgggcaacaagggcgaaattctgtctcaaaacaaaaggcccagcacagtggctcacgctcacgcctgtaatcccagcatttgggaggccaaggcaggcagatcacgaggtcaggagatcgagaccatcctgtctaacatggtgaaaccccttctctactaaaaatacaaaaaaattagccagacgtggtggcgggtgcctatagtcccaactactcgggaggctgaggcaggagaatggtgtgaacccaggaggcagagcttgcagcgagccgagatcgcaccactgcactccagcctgggcgacagagcgagactccgtctcaaaaaaaaaaaaaaaagaaaaagaaaagaaagaaagaaagaaagaattttctcctcttcctgagcatgatggttcacacctgtagtcacagcactttgggaggctgagtcaggcagattgcttgagtccaagagttccaaaccagcctgggcaacatggaaaaaccctgtgtctaccaaaaaatacaacaattagccaggcttggtggtatgtgcctatagtcccagctactttgcaggctgaggtgggaggatggattgaccctggaaggttgaggctgcagtgaactctgttcacaccacagcattccagcttcagtgtgacaatgagaccctgtctcaaaaaaaaaaaaaatccctcttccagtctgggcaacacagcatgaccccgtctcaaattaaaactttaaaaaatattggccgggcatagtggctcacacctgtaatcccagcactttgggaggctgaggcaggcggatcacctgaggtcacgagttggagaccagcctgaccaacatggagagagcccgtctctactaaaaataaaaaactagccgggcatggtggcacatgcctgtaatcccacctactagggaggctgaggcaggagaatcgcttgaacccgggaggcggaggttgcggtgagccgagatcgcaccattgcactccagcctaggcaacaagagtgaaaccccgtctcaaaaaaaaaaaaagaaagaaacaaaaagaaaaaagctgggcatgatagcacacaccagtagttccagctactcaggaggctgaggtgtgtggattccttgagcccaggagacacaggcagctgcaatgagctatgaccaggccactgcactccagcttgtgcaacagagaaaagccctgtatccaagaaaagaagagagacagacagagagagagagagagagagagagagagagagagaccaggtggagtggctcactcctgtaatcccaacattttgggaggctgaggcaggaggacaacttgagtccaggaattcgagactaacctgggcaacaaagtgagaccctgtctctacaaaaaaatcaagaaattagctggatgtggtggtgtgtgcctgtagtcccagctacatgggaggcaggaggattgcttgagcccagaaggtcaaggctgcagtaaatcattcacaccactgcactccagcctgggcagcagactgagaccctgtcgaaaaggaaagggatgggacaagacgggacaggacaggacgggacgggatggaatgggacgggacgggaagggaagggaagggaaggggagaagaagaagaagaagaaggagaagaagaaggagaaggagagagaagagaaaagagaagagaagagaagagaagaaggaggaggaggagaggaaggaaggaaggaaggaaggaaagaaggagggagggaaggaggcagggagggaaggaaggaaggagggagggaaggaaggaaggaatgttccttcctcttctatttgttggaagcatttgaaaagaatgtgtacttaacttattggtagacttcatcactgaaatcattcagtcatgaccttttcttgtttggaggtttttgattactaattctagttcttattacagatctgttgagattttctatttcttcttgagttagttttatgtatttctagaaatttgttcatccagatagattatctgatttgttggtgaataattgttcatagcattctcttataatcctttaaatttctgtaaggtcagtagtaatgcctctattttcatttctaattttagttatttgcacctttttttcctttgtcagtattgctaaaggtttgtcaattttctttatctttttgaagaaccaacttttggtttccttgagtctttgtctatttatttattattattattattttgagatggagtctctctctgtcacccagcctggagtgcagtggcacgatctcagctcactgcaacctctgcctcccaggttcaagcaattctcctgtctcagcctccagagtagctgggactacagaagcgtgccaccacacccgactaatttttttgtatttttagtagagatggggtttcaccatgttagccaggatggtctcgatctcctgacctcgtgatccctgcctgcctcggcctcccaaagtgttgggattacaggcgtgagccaccgtgcctggcccattgagtcttcaaatttctccactgtttctcctttttctttctttcttcctttttttttttttttttagatggattcttgctatgttgcccaagctgctggtcttgaattcctggactcaagtgattccccactcctcagcctcccaaagtgctgagattacaagcatgagccactacgcccagctatactgattacttttttaattttagtttttattcattttcacagacagggtctcactctgtcacctaggctggagcgcagtggcatgatcatggctcactgcagcctgaactcctgcactcaagtgatcctcctgccttggccccccaaggagctgggactacaggtagaagccgccacacctggcctgtccttattatctttttaggatacatgaaaacaaaaagattcccccaaaggcagacatgtagaaaagaaaatggggactgggcgcgatggctcatgcctctaatcccagcactttgggaagccaaggcaggtggatcatctgaggtcgggagttcgagaccagcctgaccaacatggcgaaacactgactctactaaaaatacaaaataattagccaggcatggtgacgggcgcctgtaatcctagctactcaggaggctgagatgggagaattccttgaacctgggaggcggaggttgcagtgagccaagattgtaccactacactccagcctggacaataaagccagactctgtgagaaaggaaatgagaggagaggggaggggagaggaggggaggggaggggaggaaaggaaaggaaaggaagaaaagaaagagaagaaaagaaagtgggaaactccatcgcaagcctttatcgtacgctcctccccgcagaaccagaacgtgcacatcctgcatcccctattcaacatggaaaacacttgagtagccaaggacaaaaatatgtaatgtttcttactgtgtgtacaccgggacttcctccttctggatcaaacacttcttaatgtgtaactttttggaggaggagtccaacacgctttgcttttgcaatcagaaaaggaaaaaagggcagagtatcatgcttagaggggagagaatgctatcggcaaatttaaaattccaaaatgtaaagtagaaagaggacattgtctgtccatcccacatcccagaattacaggtctggtgtctgcaccgactggctttttttttttttttttttttgagatggagtctcgctctgtcgcccaggctggagtacagtggcttgatcttggctcactgcaacctccgcctcccgggttcaagcgattcttctgcctcagcctcctgagtagctgggactaaaggcctgcaccaccacacccagctaatttttatatttttagtagaaacggggttttgccatattggccaggctggtctcaaacactcctgacctcgtgatccgcctgcctcagcctcccaaagtgctgggattacaggcgtgagccatcacacctggccccgactggctttttctcagtactttccctcggggccttctggccttggttctcctccagaatgtaggatcaatgattaatgatggatgtttctgctgtcaggagctgagatgtggcagcagtccctggagtggagtgaggaactgtttcccacaggccacgccctcggaaaagcaagataaaccaaagtggtgggcgtggtggctcacacctgtagtcccagcactttgggaggctgacgtgggaggatcacttgagtccaggaggtcaaggctgaactgcactccagcctgggtgatgtggcaagtccccacccccaaaaaaagaagaaagcagctagacgtgatggctcatgcctataatcccagcactttgggaggccaaggcaggcagatcccttgaggccaggagttcaagatcagcctggacaacatggcaaaaccctgtctctactaaagatataaaattagctgggcatggaggcacacgcctgtaatcccagctactacttgggaggctgaggtacgagaatcccttgaatccaggaggcggaagtagcagtgatgtgagatcacgccattgtgctccagcctaggcgacagagcaagactctgtgtcaaaaaaaaagaaaaaaacaaaaaaaaacaccggaaagaaaagaggctgcgctcagtggctcacgtctgtaatcccagcactttgggaggccaaggtgggaggattacctgaagtcaggagtttgagaccagtctggccaacatggtgaaaccctatctctattaaaaatataaaaaactagccaggcatggtggcgggtgcctataatcccagctactcaggaggctggggcagggaattgcttgaaccaatggggtgggggttgcagtgagccaagattgcaccactgcactgcagcctgggtgacagagcaagactctgtctcaaaaaaaaaaagaaagaaagaaagaaaagaaggaaagaaggaatggagggagggaggaagggagggagggagggaaggagggaggaaggaaggaaggaaggaaggaaggaaggaaggaaggaaggggagaaggaaggaaagaaggaaggagagaaggaaggaaggttggttaaggactgtctggttccaaagcatgcccccttcatctctacaattcttaacctaaattccagcttgaaggagtttgcagtcagttggcctgagttcaaatcctggctataccacttataaactgggtatccatgtgatttgcttaatctcttggaggctcagtttcttcatctgtaagggccaatcatgcctaagccagaagatcctaaggcctagggcataacctgcagacagcctgacactcagtgagctccagatacactcagggaatttattttagccattataatttctccactcaccactcaccaaattcatttgagcagagccccattaaacaggttcctcaacttttgcacataatgtattcctggaaaaatgtatgaaactgatttcacaaaagtcgaacaacagatttctgtgctacaaaggatgttccatttactgagaactactcaaattataaaatcccaaattacttctcacctgttaggcatcattgtcaaagatagtgtccagggtttcatacatgttatttttaaaaattaattggattggctgggcgtgatggctcatacctgtaatcccggcactttgggaggctgaggtgggcagatcacgaggtcaggagttcgagaccaacctggccaacatggtgaaactctgtctctactaaagatacaaaatattagctgggcgtggcagcacgtgcctgtaatcccagcttcacaaggggctaagccaggagaatcgcttgaacccgggaggtcgaggttgcagtgagcagagagcacgccattgcactccagcctgggcgacagagcaagacactgtcttaaaaaaagaaaaaaagaaaaaagaaaagaaaattaattggatttatcttattgggtatttttttttctcactacaaaatgatagattagatgcttgttgcaagaaaaattcaaaccaggtgcagtggctcatgcctgtaatctcagggctttggggggccgaggagggaggatcacttgagcccaggaggtcaagatcagcccaggcaacatagtgagaccccgtctctacacaaataataaaattagctgacatgatggtgcacacctatcgtcacagctacttgggaggctgaggcaggaggatcgctcgagcccaggaattcaaggctgcagtgagctatgatgatgacacggcactccagtctgggtggcagagcaagactctgtctcaaaaaaaaaaaaaaaaaaaaaaaggccaggcgcagtagctcacgcttgtaatcccagcactttgggaggctgaggcaggcagatcatgaggtcaggagatcaagaccatcctggttaacacggtgaaaccccgtctctactaaaaatacaaaaaattaactgggcgtggtggtgggcgcctgtagttccagctacttgggaggctgaggcaggagaatggcatgaacccgggaggcggatcttgcagtgagccgagatcgcaccactgcactccagcctgggcgacagagcgagactccatctcaaaaacaaaaaaaaggaagaagaataagaggaggaggaggaggaagagaaggaggaggagggaggaggaggaaggaggaggaggaaggagaaggacaaagagaagaagaagacagcaacagaaaatgagagacatgattaatccagcatgcttaatagtttagtagtagatttttccatggtgtccttcccaaaaggtttcaccaacggatgctgtctctaatgatttgggagatttctcatttccctacagcttctccagctctgagcattcccgatcaatttttcatttgactcaactggagtgggaaattgactagattgtgaaaagcatgcacatgctccaatggtctccatctcctccacaatattttttttcttttctttttttttttttttttgagatggagttttgctcttgttgcccaggctggagtacaatggcacgatctcggctcaccgcaacctccgcctcctgggttcaagcaattctcctgcctcagcctcccgagtagctaggattacaggcatgcgccaccatgcctggctaattttgtatttttagtagagacagggtttctccatgttggtcaggctggtctggaactcccgacctcaggtgatccccaccttgggctctcagcctcccaaggtgctgggattacaggcgtgagccaccgtgcccagcaatttttttttttttttgagatggagtctcactctattgcccaggctggagtgtagttgtgcgatctcggctcacggcaacctctgcctcccgggttcaagtgattcccccacctcagcctcccgagtagctgggactacaggcacacaccaccatgcctggctattttttgtatttttagtagacaggattttgccatgttggccaggctggtttcgaactcttggcctcaagtgatctgccctcctgggcctcccaaagtgctgggattacaggtgtgagccactgcacccggccttcctccataattgaacacagtcgcccagcttaagcctccaagggtccagttccaggtcaagatttgctgctttttttgttttgttttgttttgtttcgttttggttttgagacagagtcttgctctgtcacccaggctggagtgcagtggcataatcttggctcactgcaacctctgcctcctgggttcaagtgattttcctgcctcagcctcccaaatagctgggattacaggtacccgccaccacgcccagctaatttttgtatttttagtagagatgaggtttccatgttagccaggctggtctcgaattcctgacctcaggtgatccacctactttggtctcgtaaagtgctggggttacaagagtgagccaccgcgcctggctgatggggtctcactatgttgcccagcatggcctcgaaatcctggcctcaagtgatcctcctgccttggcttcccaagtgccgagattacaggcatgagccactgtgcccagtcaatgagcttttaatgtacataatgtggctgaagtgatgtgggactttcaggctagatcataaaaagatacaacttccacctggctctcagctcttggaaggtgctcgggaggccagctcccatgctgggagtacactcatgccactcaagtatactgggaggaatcgaggcatcccgccaatcatagcacccatctgcatgccctgagagtgagccaccttggaagcagattcgccagcccccgtcaaaccttcagatgactgaagccctgaccaactccttaactgcaaccttctgagaggccctgagccagaacagcccagcagcaaagccatttctcaagtcctaagctacaaagaccacatgaaatcataaggatggaccaggtgcagtgactcacacctgaaatcccagcattttgggaggccaaggcaacaggatcacttaagcccaggggttcaagaccagcctgggcaacatagtgagacccccccgcccccagctctacaaaaaagtataaaaattagccgggagtggtggcacatgcatgtagtcccaactactcgggaggctgaggcaggagaattgcctgaacccgggaggcagaggttgcagcgagccgagatcgtgccactgcactgcaacctgggtgacagagcaagactctgtctcaaaacaaaaacaaaacccaaacaaaacaacaacaaaataacaaacaaattagccggatgtggtggcacatacctgcagtcccagctactcagaaggccaaggccggaggattgcttgagctcaggaggttgaggctgcagcggagctatgattgtgccactgcacgccagcctgggtgacagagtgagaccccgtctcttaaaacaaatttaaaaaaatgctagctctacgagggcagggatctttgttttgtttgctgtcatgtccacagtgcctggaacagcattgggaacagagtacacgctctatgtggttgccacggtgattataacctaacagacctttggtctgcatattctgcgctaaaaaaaaaaatcaaaaaacaaaaaacctaccagatctgatttatgtcagggctagctcagactcttacctgtttcctgcccactcagtgcccatctcggccagtgaatgggacatagctatgacctccctctgcactgggcaaatagattagtaactggcaactatgacaggcgatccactccaaacctcgccacttccctcaggataaaatcccaggtcttctgtgcagtttccagcccccatcctgcctaggattccaccattcagccacaaggaatcatgaactgcttgtagtttgcaaatacagtagtctccagagtggagtacatacaccctataaacaaagctttggggttcaactggaaaaactttagaatatctagatttggggggttttattgtttgttttttagtcttttaaaaataactttttccttttcttttttctttttttaaagacaaggtcttgctatgttgcccaggctggttttgaactcctgacctccagtgattctcccaccttgacctcccaaagtgctagcattacaggtgtgaaccatcatgcccagctccatttatctatcaatattttatataacagttaacagaatatattgatataattgtatttgtatataatttataaataatatccatctttgaggccaggagtttgagaccagcctgggcaacatagtgagaccccgtctctacaaaaaaaatagaaaattaaccaggcatagtggcatatgccagtagtcccagctacttagcaggctgaggcaggaggatcgtttgagcccaggagttagaggctgcagtgagccaccatcaaaccactgcactccagcctgggcaacagagcaagatcttgtctcaaaaaataaataaatgaataaatatccatctgggggtgtaactttaacacttttacctataggggtgtgcaatggagaaaaaaatttggagtcgttgaacacaatgctattttgctcctcagagagtatccggcagtctctggagacgtttttggtagtcacaacagggagagtagggaaccactggcatctagtgggtggaggccagggatggtgttaaatgtcccccaatacacaggacagtcccccacacaaagaactaggccgcccaaagtgtcaagagtgctgggcttgagaagccattgcccaaaaaccccagacttagtcttgctttgggggctctgcacggctgcctcatctccccactctattcctcccctagctaagacctccaatttcagtgactctacaaagcatcccctcctccaatgaagttgccatctctgtgtccccaggctgggccagagccccaccacctaagggctccctgatgtgccctgtactgggttagaattgtccgtcccacggggttcttaaccattgcagattccctggatccctgagacagccggattctaccgggctactagagaccaagaatctgtatttttctcaagcaccgctccccccaaccacacacacactgcctgcccctatcaagggcacacagcaggtggcccagtgactagttgaacgcctactgcaagccaggcgctattacgcgatccactcgggaatcttggcacatactccactccatggtgtagacaccaggattctccccatttcacagaggggtaaactgaggttgagagaggtgaccgtagctaggacagagactcagggcaggaaaagggcccaggtcctcatgagcgccagattcccggggaaggagggagaacagagaggagggtgatgaactgggggagcgcgcgctgggtgggggggcgcggggcctcgccgcggccttctgatgcggccccgcccccacgagggacgtgaagacgcggaccccgcgcagcgtggggacatgtgaccgactgcagaggccgcgccgcctcccccgtccgaggtctgcgcgctccgccgcagggtgcagacccggggcgcccgcctgggtttggggcgcaagagcagaggcggagccagggcggagccagcgcgccgggtcccccctgaatcgaaagcgaaacaggggccggggaggaagggcggagccggccccgaggcaccgccccctgccctgcgcggctgctggaccgacgggcgcacccaggtaggggggcggctgagccgcgcagtgcggaccctcgcggggaactgcgccgccgccaccatgtctcaggaaggtgtggaggtaagcgatggctacggctgggccggggtcagccgcgacagaccccgaggagcggccgggaggcgcggagggggcttcgcagttcctggggacccccatcctagaaccccagatccttacccctgcctggcgctcgccccccttgaaaaggaaagtgactcccacgtttccccagagcgaaatgaggcctccccgaggaaaagcgggggctgcagggtcaaaggtcagaggccagagataacctggccgcccccccacaccttaggctgggacgctcgccccagtccgcgccttcccccaacgccctgtggggactttggctttttccaggaaatgccgtaaagggatgaaaggcggggggggggcggcggaggccaaaaccaagggtcaagttcgggccgggagaacggtgcctagagatgggggagggatgatcccgtttccccttcccccaccggaacccccctgtctccatcccagctggagaagagcgtccggcgcctccgggagaagtttcatgggaaggtatcctccaagaaggcgggggctctgatgaggaaattcggcagcgaccacacgggagtggggcgctccatcgtgtacggtgaggctgcaggggtcccgggcctggtgcggggaccgcgcgtgggagcgccgagggggcgtggtctagggagaggcgttgagatcacctcccccggaggtcccagccttggggaggctctgcgtcgcggctctgggtggcctggaactcccacagacccttcaagggcccttcccttatatgcactctcccccgcaggggtaaagcaaaaagatggccaagaactaagtaacgatctggatgcccaggtaacctatcccctcccctcgcaaaggaccgggtcacgggagggagagcaagaggggggacccgacccgttcatggtgactgacccccctctgaaacaggagggaccaggcattgtcggtccataactcatcacccaatctcactttttcacctctccatcatttgtccggccagggagcctgcaaacagtaggcgctcattatgtgctgattgtattcaatgggggagagagccatgaaactaagcaatgaaaggagccaggattattgccatcatagcgggggcgcagaggtcagagaaggcttactggaggaggaggtaccaagtcttaaaggatggggaggagtgagccctgggaggggaaagggaaagaaaggcaggggtcttggggtgggggagggaatggcataagcaaaggctgggaggtggggaagggttgttagtggcagtctctagaaaggctaggatgagcagaggattggggaggagagagaggcaggggaatggaacccttgtgttgaatgaatgaatgaatgaatgaatgaatgaatgaatgaatggctttgaagcacaggtgcatcatggctactttgcttctttgacagctttggtgatgggaacgctgtggatttagcctgcctgaaaggcttagtgtagggctgttaaagagtataataggccaggcgcggtggctcacgcctgcaatcccaacattttgggaggccgaggcgggcggatcacctgaggtcgggagtttgagaccagcctgaccaacatggagaaacccgtctctactaaaaaatacaaaattagctgggcatggtggcgcatgcctgtaatcccagctactcgggaggctgaggcaggagaatcacttgaacccaggaggcggaggttgcagtgagctgagatcacaccattgcactccagcctgggcaacaagagcgaaactctgtctcaaaaaaaaaaaaaaaaaaaaaatgccgggcgcggtggctcacgcctgtaatcccagcactttgggaggccaaggcgggcggatcatgaggtcaggagatcgagaccatcctggctaacatggtgaaaccccatctatactaaaaatacgaaaaaaaaaattagccagttgtgctggcaggcccctgtagtcccagctactcaggaggctgaggcaggagaatggcgtgaacccgggaggcggagcttgcagtgagccgagatcgcaccactgcactccagcctgggcaacagagcgattctccgtctcaaacaaacaaaaacaaacaaaaccagagtataacaaaacatgtatcatagtctacatttatacatataaaagtatgataaaaatgatagcagaggggccaggtgtggtggctcacgcctgtaattccagcactttgggaggttgaggcgggcagatcacttgaggtcaggagttcgagattagcctggccaacacggtgaaaccccttctctattaaaaatacaaaaaattagctgggcgtggcagtgcatgcttgtaatcccagctacttggcaggctaaggcagaagaatcacttgaacctgggaggcagaggttgcagtcagccaagattgtgccattgcactctagcctgggagacaagagcgaaactccgtctcaaaaatataataataataataataataataataataataataatattagcagagagtagcattcattgagtacttcccacatggcaagattccaggaatttatttatttcatcactgcagtgaccccaggagacaggtcctattatttatccccatttcacagacaaagaaactgaggccgaagtcacttgccagcaagcaggggcagctgcgatttgaaccctggccacctggagtcagagcctgggctctaacatgcctgtcagtgggaacccagggggcagggagtggcttgcccaagtccccacagctggaagtgatacagctgggatttgaacccacatctctctcccacttagccgagcacaacgtggcctcaaaggggcgatatgtcacaacatcaacaagcatgtggcatttgcaggcaggaagtgagtatgggggtcaggctagcctcactcaggcaagccctcccctaagcctcagtttccccatctgagcaataaggtaacaggtgtgcccacctctcagggctgctatgaggacaactgaggccacacacctggctctcaataagtgagtggtgctctgtgagcttctggcgagttaggggcaccctactcattgcggccgggggcctcccccagcaaacgggtggaaagaggcctgagccccatccccagtttctgcccctgctatctccacccaggatccaccagaagatatgaagcaggaccgggacattcaggtgagttggtggctagggcttgggatgggggagttgggagggggacatctgcaggcacagaaggatgtccattagggcaggaggggagatattcactggggcaggaagaggactcgtctgtagggagaggagggctgatgcttatgttggtgcagaaggggtgacacccccccacctcatccccacctgccccattccacaggcagtggcgacctccctcctgccactgacagaagccaacctacgcatgtttcaacgtgcccaggacgaccttatccctgctgtggaccggcagtttgcctgctcctcctgcgaccacgtctggtggcgccgcgtgccccagcggaaggaggtgatgacctaaaacttaacctcgactttgactgtcccgaactccactcctgactcctatcctcagtgactgtacctctgacctaaggatttcaatcactgagagtccaatccctgacctccaaactcagagctcagccttgatctctgatcccaacccctgacccaggactggacttctgaccttaaatgtgagaagcccaatacctccttaccccagaacctgacccttgacccacaattgaacagctactacagaaatcaaacctggccaggcgcagtggctcatggctgcaatctcagtgttttgggaggctaagtagggaggatcgcttgaatttaggagtttgagaccagcctgggtgacagggtgagaccctgtctccaaaaaaaaatgtgttttgaagacagggggtctcgccctgtcacccaggctggagtgcagtggcgggatcatagctcactgcagcctccacctcctggcctcaggtgatcctcccacctcaacctcccaagcagctgggactacaggcctgcgccaccacacttggctaatttttgtattttgtgtgtgtgtgtggagatggggttttgccatgttgcccaagctggtctcaaactcctgggctcaagcaatctaccacctcagcctcccaaagtgctgggattacaggcatgagccactgtgcctggcaaaaaaaaatttttttaattagctgggagtggtggtgtgtgcctgtggtcccaactactcaggaggctgaggtgggaggatcgtttgagcctgggaggtcgaggctgcagtaagccatgatcacaacactgcattccagcctgggtgacagagcaagactctgtctctaaaaaaaaaaagaaagaaagaaaagaaaccaaatctgacctcaaaaacacagccccaaatctggcttctgaacctcctgactagtagttcacttctggtcaatgcttaactagttcttgcaaaagaggcaggaagccaagatgtgtagtgtttgccaatttctgtggtgtaaatattcccaccatggtcaatatcaggctacccacgtgaagtcactgattgagttgggttgctcaagctgaggccagccgctgcagcacactgctagccctgaccccaacctcagacacctctgacaatccttggtcccctctctgtaccttcctgcccaccaccaccaggtatcccggtgccggaaatgccggaagcgctacgagccagtgccagctgacaagatgtggggcctggctgagttccactgcccgaagtgtcggcacaacttccggtgagggcgctgacccccagctccccctcagccctgccctaccccagccctgcccctccctgccctggccccaccctggcccagcctcgccctcggaccctcacagccctgcccgcccccaggggctgggcacagatggggtccccgtccccctgctacgggtgcggcttccccgtgtatccaacacggatcctccccccgcgctgggaccgggacccggatcgccgcagcacccacactcactcctgctcagctgccgactgctacaaccggcgaggtgaggctcttctcccccaacagcctggacagtctttgtccccttctgtgcctttaagtccccaaatctccactcagtccactttgtctcccacagcagcagccactgcttccacatggcctccatgaccccccagtctccgtggtcttgcccaggaggctctgaggtttcaccccagtggcccgtgcctgagggtccccatggcctctgcccccatggtctctgggtttggggcccctgttttgtcccctgtaatctcaggtgacccccatgtccccaggtctcctgtatcttcaacacccctgaatgtccagttgtgctggtccccgtatctggtggtctcagctcctccctagagccccgcgtggcctaagtcccctcctccccagactctcatgggacctccagccccatgtctgcagcacctctccctccctagagccccacgtgcctgggacatcctgtgctcaccccaagagccggaagcagaaccacctgcccaaagtgctccaccccagcaaccctcacattagcagtggctccactgtggccacctgcttgagccagggtggcctcctggaagacctggacaacctcatcctggaggacctgaaggaggaggaggaggaagaggaggaggtggaggacgaggagggcgggcccagggagtgacccctgccaggtgcagatacaaaccagacacggtctgtggctactttgtgttattataagatatgagctcaaaccgagatatgaatgaccttggggagccatctgaggccaagatattgacgggggggattcctgggtcccattttcagcgcccagggtcacagatccacagtgggaagttctgtgggacacattggcactgagccacaaagaaggtgtggccagaacaacttgggctcctgctgaccaatgtcctctagggcctaggggacagaggaacacagagtcacagcttcaggggccgaatgagcatggcggccttcctgagagaatatgccccaccacgaaactcagcccagtagacaccatcctggtagcggcttcggtagtggccgccgtggtgccacacaccgttgaggttggagtgggcacaggcatggtaccaccagcctccccgctggtacagggcacagttacctgaggggagagagagagtccatgtcctctcaccagaataaaagcctctacctgcacctcacagtgcaaggcttttgccaggcatcccctggcccctcccattcttattgaatacaagccctgatcttccatctcctcagcaaaaaaataggagccctggccccccaactttcttcagagtaatagccttaattccttccctatctccttaccaaagtacaagtcacatctttcccaccttttctgcaaactaggagtctaccgttcattcctttatcaaagaaaagtatctacttcctttctagaataagagtactagctctcaccctctgccctttacttgaacaggagtcttgattctttttttgcctcatcagagaaggaatctggactccccatccccccaccaggataaaagtcctgacctttgttctcttgacggaataaaagcttgcttatccttatacttaccagaggggcgtcttacctaccctacctcctttcattccctcaccagaacaggagtcccgcctcccctatcctctcaccagaataggagttctccttaccagaataggagtctcggtccctatccacggtgctgaagggcttgtcattgtgccaggaaagagagtctccagcatcaccatggtactggccaagccgcaggcggtagtggtcgctctcgggttccagggagaagccatcatagtgggcacgtgctccacggcccccccagtcctccaggagaaccagcagctcatggtccccacggctggtcagctgatacacgggttcaaggcccagccagtattctccgtctggccgcccaaagcccgcctggcagggcaggaaagtcaggaagccagaacaggctccctccccttccctgcctctgcccacctgtgcccaccttatagtgctgccaggtagtgaagaagttgactgaaccatcttgcctccgctggatcacagtccagcctccaccctccagttgctgctcacaccatactgacactacgtgacggcccactcgcagttcatacactccactctgttcatggcctgcctggcgggcctctgcacaatcctgccacgggcctgtgggcacagggataggggggaggcacagcctgggctgaccaatcccttactggagcaagagtcaagattctcacaggtcctctcaccagaataagagttctgcctctcccacttttctaccaaagagtcctgcctctcccatttcctcaccagaataagaggcctgcctctcccatttcctcaccagaatccgagctccaatagccatttctttacctaagaatctgggtcccttgtctctaatcaaaggaaatgtcaagtctggggttctttttttttttgagatggagtctcgctctgtcactcaggctggagtgcagtggtgcgatctcggctcactgcaacctcatcctcccaggttcacgcctttctcctgcctcagcctcccgagcagctgggactacaggcgcccgccaccacgcccagctaattttttgtatttttagtagaaatggggtttcaccgtgttagccaggatggtcttgatctcctgacctcgtgatccacccgcctcggcctcccaaagtgctgggattacaggcatgagccatcgcgcccggccaactctggggttcttaaaccctggttttttatggtctcctcaccataatataagtcctgaatatgatactctgaaccagttcaaactcttaccaaagtagcagtcccaaacatcgcctcactaaagtaagagtccctcctcttctatttcttgtttctcctattttcacaccttagaagtttggtcttatttttaatcagaataggagtatcatttcttctggtcttctcacaatgagagaaatctgccactaaaatcctgactcctcaattttcctctacccacaattcctcagccctaatgtcgacttacccacaggcttggtggggaccgcagggtgacctgcaggcatgggagaagccatgggctcctgctgtctctgggtctggtctctctggggctctggggctgggtccagcatcctactggtgtcactggtgctacccacaagacggaccggaaccacaggcaccagtgggggtggcggcaggacctggggtgacggagaaagtcaggtgtaattgcactaaccctcaggccaggaggcctggtctcaggggcagaaatggtggataaatctcccagctcccaaatgacctggacatctggcagtgggggtgtcccagccctaggaatgatcctccccaaaagctaaacaacttggctttaaagtgcagacaggctgggcgctatggcccgtgcctgtaatcccagcactttgggaggccgaggcgggcggatcacctgaggtcaggagttcgagaccagcctgaccaacatggtgaaacctccgtctctactaaaaatacaaaaaaaattaactgagtgtgttggctcacgcctgtaatgccagctactcggaaggttgaggtaggaggatcgcttgaacctgggaggtggaggttgcagtgagccaagattgcaccactgcactccagcctgggagacagagcgagactccatctcaaaaataaaattaaaaaaataaagtgcagacagagctgggcttaaataccggctcttggtgctcatggtttaattgatctgtgccccagcctcctctgtagagtagggataataacaacacatccaacagtatctaacttactgactcctctcaccaaccctgtaacgtagggactgtcacagagcaacattctcttatcccaaacccagaccaggacacgttccagaattcagaataacacggctggatttagacacagtgacacagggagggttatgtatatgcatgtgtgtatagaatatacataacactcctaaaggggtttttggtctttacgtgataatgatatgtttaattataggatcctatgactattcacattaagtggttaagtgaaggctataaatagccaccagtcactttttgacccaaataagttaccagaaggggcgagtaggaatccggttttcagggttttgcggatttcagaactgtggataagagatcgtggggttgcaaaacccccatttcacagacgatgctgctctccggggaggctgcgaggttacctgctgctgcccgcccgcgcctcccgggcacaggcgctccaggcgggcgatgagactgctctgctgggtgacgagctgcgccagctcgcggaacttgacgtccagctggtggaaccgggcggctgcgcgctgagcctcggcggacgcgttgagcacgcgctccccgagcagcgccagcgccgcggcaggctccgcccccagatccgcccccgggcccgccccgggccccgcctcgtgctgcagctgcgcgcgcaactggcccaggcgcgcgctcaggccgcggctctccttgcgcagcgcgcgcacctcgccggccacggcgccgtcggccgccgccagcctctgcagctcgcgtaacagctcctcgtggcggccgacgcgcatgcgcagcgccgccagctcgctggcgttggcggcctcgggcgtcgcccgcgtggatgcggggccgctccagcacacagcgcccgtgaacttctgcgggggcagcacgaaggtgtaggtgcagcgcggggcgcccgcccgcgcccacgacgcgcccagcaggagcagcagctgtagcgcacgcagccagggcttccccatcgcggcggacctgcaggcagaggaggaacggaaggaagacggggtgctggggcccagcgagacccctccgcttccacgcggggatgcgcgcgtctacacccgcgatgtcccgggcccataatttcagtccccatctcattccccccacggctggagggccccagggtgatcccactctggcttcaacaccgagctcttggcgccaggccggataacgcatctcaagcattcattcattcgacaagcgaggccgggcgccgtagctcacgcctgcaagctcagcactttgggaggccgaggcgagaggatcgcttgagaccaggagttcgagaccagcctgggcaacatggggagacccctgtctctacaaaaaaaaaaaaaaaaaattagacagacgtggtggtgcacacctctggtcccagctattcgggaggctgaggcaggaggatcacttgagcccaggagttcaaggcttcagtgagccatgatcgctcccctgcactccagcccgggcaacaaagtgatagcccatctcaaaaataaataaataaataaaaacaaggcttatggggccgttcaggccggtaattccagcactttgggaggccgaggtgggctgatcacttgagcctaggagttggagaccagcctagacaacacagagagaccctgtctatacaaaaaatacaaaaattagctgggcatggtggcaagggcttgtcatcccaagatcgcctgagcccagcagttccaggctgcagtgagctgcgatcacgccactgcactcaagcctgggcgacagagcaagactctgtctcaaaagaaaaaaaaaaaaaagcagtcactaggcacaaatgtgtgccagccccctttctaggcactgggaatacatttaggaacaaaacagacaaaaatccctcccctagtgggcaaaaaaataaatatgtactgtataggatgaataaatagagcatattagacaatgttaaatgctaaaaataacagtagggccaggcgcggtggctcactcctgtaatcccagcactttgggaggctgaggcaggtggatcacgaggtcaagagatcgagaccatcctggctaacacggtgaaaccccatctctactaaaaatacaaaaagttagctgggcgtggtggcgggcacttgtagtcccagctacttgggaggctgaggcaggagaatggcgtgaacctgggaggcagagcttgcggtgagccgagattgtgccactgcagcccagcctgggtgactgagcgagactccatctcaaaaaaataaaataaaataaaataataaatataaaaataacagtaggactggtgaggcggctcaggcctgtgttaaggcgggaagactgcttgaggccaggaattcaagaccagactccagactgggcaacgtatccagaccctgtctctaccaaaaaaaaaaaaaaaaaaaggaactgcaagtgcacagaaccacatctggctaatgtttaaattttctgtatagtcagggtcttgctatgttgcctaggctggtctcccctggcctcaagtgatccacctctgcctcccaaaatgctgagattacaggtgtgacccaccatgccctgctaatttttaaactattttgtaaatctgggctcagtggctcacacctgtaatcccagctctttgggaggcagaggcgggaggatcgattgaggccaggagtttgaagctgcagtgagctatgatcgcagcattgcactccagcctggggacgagagcaaaccctgtctcttaaaacaaaacaataacaaaaaacagcaaactaggtaaagaatacgcaggtctgtgcaggggcagcttgagagggggttgcctaaagggaaggcctggtggaggagcagatctaagtgcaaaagctctgagactggaccctgcctgatgtattaaagcaacctgggagaggttaaagcaaaagcgaagggaggctgggtgctgtggctcatgtctgtaatcccagcagtttgggaggccaaggtgggtggatcacctgaggtcaggaattcgagactagcatgaccaacatagtgaaaccccatctctactgaaagtgcaaaattagccgggtgtggtggtacaggcctgaaatctcagctacttgggaggctgaggcaggagaatcacttgaacctgggaggtggaggttgcagtgagccgagatcgcaccaccgcactccagcctggacaacaaaagcaaaacactgtctcaaaaaaaaaaaatagcaaagggagcagggtgcaaggaggtgaggtggggtgagggaaacgtctcactaactgccttcccatccgtcggatattggaaaccccatcttccacgtcctcagaccaaaaccccagcagatccaacccatctcagcagatctaatccatcagccagacccgtctgctcttctgcttagatcctgaattcctccacgtctccgctactccccactgcccccagaccctccctgaattcccagctcaagacaccatctggatgacagcagctgcctccctgctctctggatttccatcctcaaccccaggtctagtctctctgacagcagccagagggcgcctgtgaacatctgagtcagttcacgtccctccctccctcctctgccctgaatccttcttggctcccacctcctttagaggaaaagcccaaatccacccatgatccataaaaagttgcgctatcttggtgactcacgcctgtaatcccagcactttgggaggcggaggcgggcggatcacgaggtcaggagatcgagaccatcctggctaacacagtgaaaccccgtctctactgaaaatacaaaaaaagtagccaggcgtggtggcggctgcctgtagtcccagctactcgggaggctgaggcaggagaatggcttgaacccgggaggcagagcttgcagtgagccgagactgtgccactgcactctagcctgggcaacagagcaagactccatctcaaaaaaaaaaaaaaaaaaaaaaaaacttgtgctatctgccatatccccttctgccctcctcccaggcccttcctcacacgaagcaagttccagcctcaggtcctttgtacctgctgtttttgcagcctggaacattgttcacaacttaacatcattcccttcctatccttattcaagtctcagcagcgctccttgaacagcagatttagggttgtacctccatatacaagctctctctctctctgtctctccctctctctctctctctttctctctttctctctctctctctctctctctcccccacgccctcttttttttttttttagacggagtctcgctctgcaatctcagctcactgcaacctccacctcccgggttcaagtgattcttgtgcctcagcctcccaagaagctgggattacaggcatgcgccaccacacccagctaatttttgtatttttagtagagacagggtgcctgatcaacaggtgaaatcccgtctctactaaaagtacaaaaaattagctgggcgtggtggcgcatgcctgtaatcccagctactcgggaggctgaggcagaagaacggcttgaacctggcagaggttgcagtgagctgagaccgcaccactgccttctagcctaggcaacctgggtgagactccatctcaaaaaaaaagaaaaaaaagagagagtcgtgctctgttgcccaggctggagtgcagtggagcaatcatagctcactgtagcctccaattcctgcacacaagtggtcctcctgcctcagcctcctgagtggttggaactacaggtgcgcaccaccatgcccagctacttttttgtagggagggggtctcactgtgttgcccaggctagtctcaaactcccaggctcaagtgatcctcccaccttggactcccaaagtgctgaaattacagatgtgagcaaccacactggccctaaacctatgcttcctgatgcctgcacaagcacatatcccgagggtctccatctcacacacacattgcctcattcatgcattcaaccacagacaccttgagtgcctattgtgtgccagggatgctgttttaggcaatgaggacacagccttaacccaaacagacaaaattcctgcccttgcagagctgacattcaagttgggagaacagagaaataagtcaaacagccgctaggtaggtcagagggtaatcgtgcttaggagaaaaatggaacaggcaagggggtgacagtcccggaggtgggggacatttaatagaggagtcaggactgggtgtgctgactcacgcctgtaatcccagcactttgggaggccgaggtgcctgtaatcccagcactttgggaggccgaggtgcctgtaatcccagcactttgggaggctgaggtgggaggatcacttgaggccaggagtttgagaccagcttggctaacgtggcgaaaccctgtctctactgaaaatacaaaaattagccaggcgtagtggcacgcgcctgtagtctcagctactcaggaggctgagacacaagaatcacttgaacccggaaggcagaggttgcagtgagccatgattgcaccactgcactccagcctgggcaatagagcgagactctgtctcaaaaaaaaataaaatagaggagtcaggaaaggcctcacagaagaagtgacacttgactggaacagtgcctcatgcctgtaatttcagcactttgggaggccaaggcaggaggattgcttgagcctaggagtttgagaccagcctggccaatatggtgaaagtccatttctactaaatataaaaataaaaataaaataaagaataagggacactttcacaaagacctgatggaagagagagaagaggaagagcattccaggcagagagaacagcaggtgcaaaggcccggagattgcacccaagaaatggcagaaaggggccaggcacggtggctcacgcctgtaatcccagcactttgggaggccgaggcgggaggatcacctgaggtcgagagttcaagaccagcctggccaacatggtgaaaccccgtctctactaaaaatacaaaaattagctgggcatggtaatgcatgcctgtaatcccagctactactcaggaggctgaggtgggagagtcacttgaactcaggaggccgatgttgcagtgagcagagattgcgccattgcactccaacctgggcgacagagcaaggctcaaaaaaaaaaaaaaaaaaaaggccaggtgcggtggctcacgcctgtaatcccagcacttgggaggccaaggcaggtggatcacggggtcaggagatcgagaccatcctggctaacacagtgaaattccgtctctactaaaaatacaaaaaaaaaaaaaaaaattagccgggcatggtggcgagcgcctgtagccccagccactccagagactgaggcaggagaatggcgtgaacccggaaggcggagcttgcagtgagctgagatcgcgccactgcactccagcctgggtgacagagcgagactctgtctcaaaaaaaaaaaaaaaaaaaaaaagaaatggcagaaatgtctatgaggccggaagagagaagggggaagcaggaggaggtaagaagtgtcagggcaaagtgtgaagggtcctgtgggcccggaggaggacttgggttttactctgagtcaggcaggagccatggagggttctgggctggagatggccacatttacttctggactcagacaccaagcaggggctcacaaggatccgggggtagggtcctctctttgtccccgatcactgacatgccccaccccccacaacagagattgagcaaccccccagaactgggacgtgtgtataacacccgctgccttttacactctcagcctggggtggcggggtggcctgggggcccccaagccaagctgtggtcggagtttccccacagtgagaatcaacctccacctaccttcccaccctctcacctctgatgcccaagaccctgaatccagcgaagctcacagaacacacaagaagtccaaggaagagccgagggtccagtggggcctctgagctagagacggggagagggcagtgggacagaaggagagaggaggcttggtaaccactccccagcccccagagcctgggagtggagctgggatgctgggcccaggagcccaaactataaatatttagcatttcccgaatgagaaatgagacagaattgccagacccccctgcccaggccaccagagcctgataacacaggtcagtgtcctggacatccctccctttcccccacaccctccactgcagagcccagagcgtgggaggctgcaggccctggggcagccaggcgtgatcccagccccagacacgcacacaccacacatagaaagaggaacatcactggggacttaccgtgtgtagggcttggctctaaactctccacaccttttacgtatttgatccttacaacctgagctggattctgtatgtaccctcattttacagcagggaaaactgaggctcagagagggtaagcaacttgcctgcggtcacacagccaaaaagagaccaggatgggagccagccaaggtagcttgactcagaaactcacacatgtacaccacagctgtcacacacatatgggcacataacagagtggacacaaacacacacacacacatttgcacgcacgcacacattaacacccagcgaaagtctgggtgcagtggctcatgcctgaaagccagcactttgggaggccggggcaggtggattacctgaggtcaggagttcgaaaccatccttgccaacatgctaaaaccccgtctctactaacaatacaaaaattagctgggcatggtggcatgcgccagtaatcccagctacgcgggaggctgaggcaggagaattgcttgaagccaggaggtggaggttgcagtaagccgagatcgagcaaccgcatgcactccagcctgggcgacaagactgaaattccatctcaaaaataaataaataaataaataaataaataataaataaataataataaagtgaggaattaattaattaaaataaaaaataaatataaaagacacagctgtaaatttttaaattgtgatagaaacaatatattcttaaagtgaaaaccctacctcagttacatgtgatttatgttttttggattaatctggattttataattagaaataaaaatgtaaggctgggcgcggtggctcacgcctgtaatcccagcactttgggaggccaaggtgggcagatcacgaggtcagcaattcgagaccagcctggccaagatggtgaaaccccgtctctactaaaaatacaaaaatttgccgggtgtggtggcccatgcctgtaatcccagctactcaggaggctgaggcaggagaatcgcttgaacccggggggcggaggttgcagtgagccactgcactccagcctgggcgacagagtaagactctgtctcaaaaaaaaaaaaaaaaaaaagaaaagaaataaaaatgtaagattttgagtccacataattatttgttgaaaataatacaagtcagtataatagagaagcattcatatattcaacactgtgagacaaaacaccagagaccttggatttgataattgatctgatatcctggacagtattcatatgtacagtgatagctatctttctttggtgttttttttgttttgtttgtgtgtgtggtgtgtgtgtgtgtgtgtgtgtgtgtgtgtagttttatggttctgagttggtggccagtaagttccatgtagtgttggcacttatttaattaactattcatgattttgttaatagcttgttatagaattcaggcatatatttttcagcataagaagccaagcacaccagcttgtcattggagagaatatattaagtgagaaaaacattcaggaatcagagctttaacatgttaaagttagtgctaaacattgtcatattggatctgaacctatcctaatatataaccataaagcttgacttctgcattggaactatgctttcataaataaaggatatctcattgattaaaaaaaatttttaaaaagacacagctggaaacataacagtttcaggcaacaactgtatgttccaaatatggtcacacacacatcacaacttaaagggaaatggggtgggctgagtgggtctttatctgtgtgtcaggcttgtccacatcctggttcttgtgatcacacagtagtgcacagatacaaaacaggtacacacagttgacacccggaaacctatccaccgcaccacagaggtcaccgtctgtctcccacacactcggtcacattttcacacaagtcaaatcacacgaggacggaactgggggaagtaaccatgcagtcatttcccaggggtacaaagaaactcacatagagccccacagagcccaggcccagggtctgagacctgtccaaaggccccaccgacgaccagccacacgccgggagagtcacctccttcccctggtctgcaccatcctgagctcccgagtaactcgagtggactccagggttgaaaaaggaaatggtcgtcccagatctgagagaggctgccaggctgggctctgggcctgggttggggcccccacactgggcccctcggccccccaccctcagccccctctggcttccccattggcagtagagagggagggaacttcataagtcacagagaggggctgaagaatacagagagtcagacagatggagatgggagaggcatagggagatgggagagacatagggagatggcagagaaagggagagacggggagatggggagagacagagagagatgggaagatggggagagaccacagggaggcagatgagaagaaagaaacagggatggggccagacacagagaaaggaaacttctttagtttccatcttcagttataaatgatgaaagagacaactgatgacagagacaaagttacaagagggagaaagagacagggggaagacgagggggaggggagacacatctgggggagaggaggaagaattggggtgccagagagagcaaggagggagaggaggccgatgggggaggagagagtaatgttcagcccagtgagggggtgtccctttcccccactgcaaggttttggggaagaagccagaggcctgaggccaagactgaggctttgagcggaaagaaggagggggcgagttattcacgaaacgcccgccttgccctgagtttccagaaggtgatgtggagtttccatccctcagcctgtctgcagacaggggtacccggggaggacagctggcccagaggagttgcgagactaaagtgaatgattgccacagtcattccctccggtggcttctccccaagtacttggcgccagagcgcccaacattgtgcatacatggtcgctcctaattcgtgggcccgggggacattatcagccttactttgggatattttaggagcctcggaatgcagaaagtggttttagcccagctggaggaaatgggccgaagcgggattcgaaccggcggattcgtttctctgcagcccggagccgcgtagccccgccccggtctccctagaaacaggcacccgtgtctccatagcaaccgctccatctgattgcccctccccgctcccagaggccacctagtgcgcaggcccgcctgatgtcgtcccacgccgtgccggctctcaggcgccggaagtgagctgcgcagcgccggaagcggcggacgcaggaggcctcgtggaggacacagcagcatgggacagtcagggagggtaaggcccggcagcttgggaggcaggtggcgcaggtggggtcccggccgaggtcgcggcgctgaccctttgtctctcgtcgccgcagtcccggcaccagaagcgcgcccgcgcccaggcgcagctccgcaacctcgaggcctatgccgcgaacccgcactcgttcgtgttcacgcgaggctgcacgggtcgcaacatccggcagctcagcctggacgtgcggcgggtcatggagccgctcactgccagccgtctgcaggtttgtaccccacccccagcccgcctccacccaccctcggcctagtcttcgtagctgcagtaatggctcccgctgtaaaactgtgggaggacttaagtctccccagctggaaaaaaagaccctcatggggagcatcatttctgcctttcagggcttttgctgggctggagtgagggcgcgcagcttgggagatagatagtcgcctaagcctgacagttaagactggaatctggagccgggcgtggtggctcatgcctgtattcccagcatttggggatgctgatgcgggaggatcacttgagcccaggaattcgagaccagcctgagcagcatggtgaaaccccgtctttacaaaaaatagaaaaattagtcggatatggtgttgcgtgcctgtagtcccggctactcgggaggctgaggtgggaggattccttgagcccaggaaattaaggctgtagtgaatcgggatcgtgccacttcactccagtctgggcgaccggaggagaccgtgttagaaaaaaaaagactagaatctggaggcagcaaagcagggttggaaactgacttctccccagtatctgatgcaagttacttaacctctctgggcctgagttcgctcatttgtcaatgggaagatgcgctgtgagcaagagacagagttagaactcaaatctgcgtccgactgactctaaaggctaagatccttttgctcctctgggcttgttgaaagggtcagatgcaagacagaccataacaggatctgcaccgtcagcttatagttgtcacaacaagggataagctatgttttctttttttctttttgtcatttccaggttcgtaagaagaactcgctgaaggactgcgtggcagtggctgggcccctcggggtcacacactttctgatcctgagcaaaacagagaccaatgtctactttgtgagtagacgccctcacccttcatctcccccagacccccccttcccctatctctcatgatgaacacatatgcctctgagctgctgtgatttctggcttcaaagtaaacgctctgaagaagagatggggcaaaggtgcctactccgggcacctctgctagacccctccagagtcactgatcttttcttctcctgcagaagctgatgcgcctcccaggaggccccaccttgaccttccaggtcaagaaggtgagaggggtggaggtggtacaaagccatgtggggtgggagctggacttggggttgtccgcagccatgtgtggttggtggtcaccccctcctctctcctgtcctacagtactcgctggtgcgtgatgtggtctcctcactgcgccggcaccgcatgcacgagcagcagtttgcccacccacccctcctggtactcaacagctttggcccccatggtatgcatgtgaagctcatggccaccatgttccagaacctgttcccctccatcaacgtgcacaaggtgggtctggcctggcgaggtggcaggtatgggggggtgcagcggatagaggtgccacaggccctcagatggattgctcactcctcccagcgctgagactgggagctcctgggtctgctgagtcctgaggtcaaatcccactcctgtgtctgatgatgctgggcaaaagtgtccagagattcccccagcggtccacaccccgtgagctgcaccttttccagccggtggaaagaaatactgatggagctctgtttcccacgtgtgttgagtgctgggctgagcaggatcgtagcatctcttcttagggccctgttttacagagggaagctgcgggcccagtgctatggcttcggcctgtaatcccagtactttgggagggcgaggtgggaggatcgcttgaagccaagactttgagatcagcctgtgcaacatagcgagaccccatgtctacaaaaagtagatttttaaaaagcccggtgtggcggtgcatgcctgtagtaccagctactggggaggctgaggtgggaggatcacctgagcccaggaggtcaaggctgcagtgagttgtgttcacgccactctactccatcctgggtgacaaagcgagacactgtctcaaaaaaaaaaaaaaaagcaaatctgaggctggcagagatgctaagtttagattccagggggcaggactggatttttaatttcatctggctcctgagtcctagctcctaatccttgtcactagtgactctcagatgggacttataaattatatataagatatcagtcatcagggaggctaatacggctctgggaccagaatttcttgtttaccttttttttttttttttgagacggagtcttgctctgtctcccaggctggagtgcggtggcacaatctcatctcattgcaagctccgcctcccaggttcacgccattctcctgcctcagcctcccgagtagctgggactacaggtgcccgccaccacaccccggctaattttttgtatttttagtagagacaggatttcaccgtgttagccagggtggtcttgatctgacctcgtgagctgcccgcctcggcctcccaaagtgctgggattacaggcgtgagccaccgtgcccggccttctttactttttttttaagagacggggtctccgtacgttggtcttgaactcctgggcacaagcaatcctgcagcctccgcttcccgagtagctgagactacaggcgtgcaccaccacatccaactcatttttccatctactttttgtagacatggagactcgccgtgttgcccaggctggttttgaactcctgggctcaggcagtcccaccacttcagcctctggagtagctaaaactgcaggtgcgagctggaagcagcatttctagccagtgccacagtccacgaacagtgtgtgtatcccccaaagcccccacttccccaaactttgccatgagtctactggactatgctctcttcctccccttccaggtgaacctgaacaccatcaagcgctgcctcctcatcgactacaaccccgactcccaggagctggacttccgccactagtgagtgtcccagcaggatgggagacgagggggtgccgggtgggggcctccacatgcggctgatgacagcacttctgctgagacgctgtgattgctctgtccaaagtaaacgccctgacgcactgtgggaagggtgagatgggcaccgccagccccatcacgtgccccctgaccacccccttgccgtccactcatgttcctgcagtagcatcaaagttgttcctgtgggcgcgagtcgcgggatgaagaagctgctccaggagaagttccccaacatgagccgcctgcaggacatcagcgagctgctggccacgtgaggagggcatagggcgggaggccactgcggcccggggaccccagaacaggaccgggagcctgagctcccccactgagccctgttatgtcctacacacaggggcgcggggctgtcggagagcgaggcagagcctgacggcgaccacaacatcacagagctgcctcaggctgtcgctggccgtggcaacatgcgggcccagcagagtgcagtgcggctcaccgaggtgaggcccagggcagggggacccccgggctccaccagtcccaacggtgggctgacgcttcttcctcgtcccctcagatcggcccgcggatgacactgcagctcatcaaggtccaggagggcgtcggggagggcaaagtgatgttccacagttttggtgaggccggggccgccgggggtggggggtcatgggtgtggagctgcacccggatcttggtgacccgcgtctcttggctcagtgagcaagacggaggaggagctgcaggccatcctggaagccaaggagaagaagctgcggctgaaggcgcagaggcaggcccagcaggcccagaatgtgcagcgcaagcaggagcagcgggaggcccacaggtccaggcagagctgggaagggcagggccaagggggggtccctgggatgggcggctatgttgacccccacgccctcctccagaaagaagagcctggagggcatgaagaaggcacgggtcgggggtagtgatgaagaggcctctgggatcccttcaaggacggcgagcctggagttgggtgaggacgatgatgaacaggaagatgatgacatcgagtatttctgccaggcggtgggcgaggcgcccagtgagggtatggagtggggtctgcagcagggcacccagagcctgtccttgtctctgggggccctgacactgtctctccccacagacctgttccccgaggccaagcagaaacggcttgccaagtctccagggcggaagcggaagcggtgggaaatggatcgaggcaggggtcgcctttgtgaccagaagtttcccaagaccaaggacaagtcccagggagcccaggccaggcgggggcccagaggggcttcccgggatggtgggcgaggccggggccggggccgcccagggaagagagtggcctgagcccaagccgcaccggagcagcggctggattgaacgccccagattggggcccgagatgtggccctcggtttcctttcataaaggagttgtgtccccagcccttccactccagtaaagaactgaattggccaggggtccacgtcagcgtttgggatgggggattctggagccatacaaagcaacccagagagtcctgggccggccacacccgagagtccctcccacctggtttcttcctggaagctgggtctctcccctaccctgcacggggttggtttcattggtggcagcagcagccatgagtggcccctccccccagtcccaccaaagagccgtgcaagcagacaggtcacactttcagcagatgagcttgaacctcaggagggttgtggcacaatgaggaaggaaacgtgggtggaaaggcacgctggcctgctctgctggctgggccagtaactggggatggggctggggcagggcccactaagccactggtgactgggggaggggctggggaactgggtagcagacacaggctgaggatcggcacgggagcatggcagccaacgtctcgggtaaggagaaggcatgttggctgtctctgggggtctgcagattgtcaggaggtgggggtagtgggtattggtaaaacacctaggtctggggctgggcacggtggctcacgcctgtaatcccagcactttgggaggtcgaggggggtggaacacgaggtcaggggttcgagaccaccctgaccaacaaggagaaaccccgtctctactaaaaataaaaaaattagctgggcctggtggcacatgcctgtaatcccagctactcgggaggctgagacaagagaatcacttaaacccgggaggcggaggttgccatgagccgagattgcaccattgcactccagcttgggcaatgagcgaaactccatctcaaaaaaaaaaagcctaggtcaaggctgggtgtggtgatgcgagcctgtgattccagctactcgggaggctgaggcagggggatcacttgaccccaggaggtcgagactgcactgagctgtgattgcaccactgcacctcagcctcggtgacagtgaaatcctgtctccaaaaaaaagccacgtctagacgacacttcctccttaagcaggctggcgttgggagcagggaggcgcctccggagaagcctgtccccagcctgcagaggcaggggtggggtgcacaaggagtgagtgcccctgtgctgctgtgccctgggcactgtggtgagcactggcaccagtaatgggtaagcaggcccccccatcctcccgaaggagggagatttttctcaccgtcatcaggtggcgcagggtatgggggaaaataacgcagggaagggagagtggaggcacgagggctgctgtcaacagtggttagggtggccttggggcctctcgcaggcaggaccacggacgtgggaagaggagcctcaagaatgtctgggtgtggctgggcacggtggctcacacttgtaatctcagcactttgggaggctgaggcgggcagatctgaggtcaggaattcgagacctcttggccaacatggggaaaccccatctctactaaaaatgcaaaatttaaaattaaaccaggcgtggtggtgggtgcctgtagtcccaaatactcaggaagctgaggcaggagaatcacttgaacccgggaggcagaggttgcagtgagctgaagtcacatcattgcactccagcctgggtgatgagagtgagactctgtctcaaaaaaaaaagtctgggtgcgaaggtaccaaggcacaagtctgcaagagcagccaggaagcctgggtgggctggtgcgagggagtgagtcgcggagcacagagggtggcactggggggtatggcgggcgggagcgctcttgggggaccttgtggggtgagtctggctttttggcggcaactccctggccaagtgtgagcacctggaagcaaaaggatggggcaggactccagcgctcgcgggtgctctctggtggccacggggagaagaggctttgggcggcggcgggtgccaaggtcagggcagagtgggggctggacccccacggggctttggacggcacagatctgaagtggagccggcaggccttgctggggctggactttggggaggaggcctctagtggggccaggtgtggtgggggagtagggtggccgctgtctgtgttaccagtggaccttgagctccaagactgcctggcccgcctaagctggtccattggggcccaatgcataaccctggctctgagcctcaatcctgtccacataaaggagtggagcccggtccccctccagggaggggaaagaactcgtgtccagggatccacgccatggcagacgtgggctcttggggtagcaggagccgccttatgggggaatagggctcagctggtgacaccttctgcccacaggtgccaagtcctgccctgccaacttcttggcagctgccgacgacaaactcagtgggttccagggggacttcctgtggcccatactggtggttgagttcctggtggccgtggccagcaatggcctggccctgtaccgcttcagcatccggaagcagcgcccatggcaccccgccgtggtcttctctgtccagctggcagtcagcgacctgctctgcgccctgacgctgcccccgctggccgcctacctctatccccccaagcactggcgctatggggaggccgcgtgccgcctggagcgcttcctcttcacctgcaacctgctgggcagcgtcatcttcatcacctgcatcagcctcaaccgctacctgggcatcgtgcaccccttcttcgcccgaagccacctgcgacccaagcacgcctgggccgtgagcgctgccggctgggtcctggccgccctgctggccatgcccacactcagcttctcccacctgaagaggccgcagcagggggcgggcaactgcagcgtggccaggcccgaggcctgcatcaagtgtctggggacagcagaccacgggctggcggcctacagagcgtatagcctggtgctggcggggttgggctgcggcctgccgctgctgctcacgctggcagcctacggcgccctcgggcgggccgtgctacgcagcccaggcatgactgtggccgagaagctgcgtgtggcagcgttggtggccagtggtgtggccctctacgccagctcctatgtgccctaccacatcatgcgggtgctcaacgtggatgctcggcggcgctggagcacccgctgcccgagctttgcagacatagcccaggccacagcagccctggagctggggccctacgtgggctaccaggtgatgcggggcctcatgcccctggccttctgtgtccaccctctactctacatggccgcagtgcccagcctgggctgctgctgccgacactgccccggctacagggacagctggaacccagaggacgccaagagcactggccaagccctgcccctcaatgccacagccgcccctaaaccgtcagagccccagtcccgtgagctgagccaatgatgtggcctagcggaagctgcctcctcaccctaggtgttgctggagaaccctgagggcagggcccgagccccgacacatcccttcccccaaaaagcaacacctgtgcttgcagccaggtcaggcccagctgcagcccaggcaggagcagtcgcctttcccacccacagcgctggccacagggctccctgcagggtcagggaccagaccacgcccagaggaggggaggcactggcccccgccacaggactggagacgcaagaacaaaaagaaccaagtagagagagtggagctgctttattgcccttggagcccgcgctctcggaggctgtcttctgtcgccaagggtcccggaccgagtacacagtggcagctggcttagttggtggacggcctggggtaggggagggtggcaggtataagacttctgggggcaccccaagaccccagacacccaagtggcatcttgggggtgggtgggcagaggacggggtaatgtgaggacgaagcgggcacggagccagatggccagtctccaggcctggtccacggactggcagggaccccaggcacaagagctgccacccctctgcccggttttggaaaaaaacaataaaggactgtcccctcaaaaccagccgggggactgttaaattggctcagggctattggttggcccaacactccgtgaaggtgctgggacaaggcagggagcaggggctggggcagggatggagtcttacttggcccactcgacgttgaggatgaggtggtcgtagccaaagccggacaccccggcaatggcacgcgcagcatcctcgcggcggtggaagctgatgaaggcaaagccctgtggaggggcgggatggggtcgggcacgagctaggacaggcgaccctaggacaagtgaccctcacacagccccaccgtgcctgcctgcctgcccaccttggattggccagtggtcttgtccttagccaggtagatgcgggagatggagccgaaaggccggaagagctcctgcaggtcggtctcacgcgtgtcctctgacaagttggtgacacggatggtggcgttgtcgtcggctgtgtgggagaggggaggtggctgtgagggggaggacactgcccagccctcgtgtgctgcccagccctcgtgtgcacgcttcggggataattacgaggtgccgggaggtgcccacccaccagcctggcgtcggggtgcccctcacctctgcggttgggctgcatggactccccgcggcggctggccccgtcgcgcaggctcggcggcacatacttccctgtcttgttctgcgtggcctgcaccggctctagctctggggaccaaaagacagtcaagttcaacctcactgtggcgcaggcgtggggacagagccgccccaggaagctcgggcttcagtgttgagccagcgcaggcactgtgtgccaaaccacaggcagccagttggccacgaggacaccaaggtgacacctgagaagctgacaccatttgagctcccagccagcgacactggtggaggaggaggaggaggagccccgaccccaccccagagagggcgggaggacaacaggggcagcagcctcacatgcacagcaacggcagacatgggacacacaacaggaacagcgcccaggtccccctcgcgtggcaggcgacaagtgcacgtctgcactctcacactcgccaccagcaaatcccaccaaagaattcggacggtacagccacaggcatgcaacggagacactatacacacagtgcgcacacacgatgtggggtggtcagcaccctggggccgacagacagcagctcatcaggacagtcacagggccaccagcaaagtcacagctgccaagtcgcacatatatgggagacgcccgtctcccaaccataggaggtacagccaattaggaaggcacagacgccccgaggagagtctggcaccatcaaacccgctgcactgtcgtgcgggagatgacagcacgaaggcagcagtggggacagaacccgtgcactgacagcaggaccctcccacccccacacctcccggcagcttctccttctcgccagtagacaggcccagctgctcggccagctccttctgcatgggccccagcgtatccttgtaggggcagcgggtggtccagtggtcgcccttgcagatgcggcaggacacgatcttctggcccttgagtttgttcatagggtcctcctcctcctggcagttcaggtcctggcaggggcgggttggggggagctcagaggcggctaaggcaccccctttgccccaccccaggatgccagccccacctgattgccccgcttacctctttgctggtgatgaacgtcatagagacatcgtcactgacagtggtggtggccacattgggtccgggggggtcaaactctgagttcccgaacttcttccagttctgggctcagggagggatgggggacagttgagggcaggggcaggctgggttccacagtggggtgccctagacctacaacagccacccccagagtgtctgggcctcaaaccccatcttcatcctcctcaagcactccctgaacagtcctggcgacagttgtttcctgagtacacgccaggcctgagctccaggaggcagggcagctgtcagcctccgggtccaggtgacagctacacagcgtggggcctgcgcagtctggcggaccagctcccaccagggcgcaatactcagggatgtgcaggggtccacctagacctccgggcccttgagctagacaacctgagcctcagcttcctcccttataaaacgggaaccacaaaagcttcctgcctccctgggctcctaaggagactgaatgagaaacacttcgtgcaaggtgcttggcatggggtatgttacaattaagtgcacagcaagctgttctaagtatacttattgctaacgcttcttccaaaaactgctgcgaccacctcctgcttccgttcctgcaggttgacaggccaagaggaataagaatctaaccgtggctgggcgcagtggctccctcctgtaatcccagcactttgagaggcgaaggtgggagatctctcaagcccaggagctggagaccagcctgggcaacatagtgaaaccccatctctacaaacaattaaaattagccggtgtggcagtgcacacctgtaatctcagctactcaggagggtggggtgggaggatggcttgagcctgggagttcaaggctgcagtaagctatgatcgtgccactgtactccagcctgggcaacagaactggacactgtgtctttaaaaaaattaaaagaatctaatttttattcgatatttacaatcgatgttatttgatatttattaatataatttgatatctatcatcgaactttgattagatatttatcatcatttatttagttgctatttatcgactgctgtgccttggacttttcagggccccaagacagtgcaagcaccccaggcctcagttcagcttcaacaaaataggtacaaagaggtaagcctggccgggtgcgatggctcacacctgtaatcccaacactttgggaggcctaggtgcgcagatcatgtgaggtcaggagttcgagaccagcctggccaacatggcaaaaccccgtctctactaaaagtacaaaaattagctggcgtggtggcacatgcctgtaaccccagctactcgggaggctgaggcaggagaatcacttgaacccaggaggcggaggttgcagtgagtcgagatcgtgccactgcacttcagcctgggggacagagcaacactctgtctcaaaaaaaaaaaaaaaaaagagttaagccccatctctaaacacaaagtccgggagcacggttttccaattcctctaggttagccctggggaagaagagcctcaccttcctccttgcgacagcctttgaagccttccgggtctcaatcctgaaggtgcggacaatctgaggatgggaggggagaagggtcaggctcctgggaccaagggatctcctttatcaacctcctcaacacaccccaccccattccggtctatgggcccccaagcacaagggtccccactccctgcaccccccaccctcaccttgaacttcttgccatcctcatctatcttgtactctgtcactgtctttatgtttccgttgatgacctccttgggaggcggcagtggagctggcagaaggggaaaaacagagaaagactgagccctgggtcatggggatcaggagcggcagggctggagggagaggcagcccggacaccgagtggcagtcctcactcacctcccggcagtcctcactcacctcccggcagtagctctggctctgggctggtgtcacctgtggccagagggatccccttgaggagctcgctggtgacacatttgtctgcaaaaggcagcgtaggaaggaggagtcagctccaggggcaggagctccccagctgcgatggaagggcttttgggatgacgcctacagcaaaagcggagaaaggcaggccaagggcagagggctggccaggcaacgcactgggatggccctgtggggactcggagtggcaaggatgggagatccctcgtaggaaggtgggtgccaggccatgaagccaaccaggcgccagtagagaaacaggagacgggagattacaacttcctccctggaggggaacagctgggaggcagtggcatgggaggaagagggacccgccggggaacacctggagttggcaacaggcgggtcccaaggaggatggcgcggggcaggggcagaccgtgacggggtacacggtgccagactgggagatggaagcaggcggcagtcacacggcttgggcctggccgcgaataccccgggcgaccgtgtacacttaccgtcctccccctcctcctccacctggtcggcccaactgggcttcgaactgcggaaacaaatgtgtggggaacgaagattaagtcagccaggcccggctcccgcagcctcggcgtacccaggccccataatacttcccagagcaccccaaccgcttcccgtgcccctttccgcgatcgccgactcactcaaagtctccagtaggcatcgcaaaaagtattctccacgcagcccaagcccggccagagagcggaagcgggcgaaaacgagacttccggtgccgccgtcgccgcctagaggggcccagccgcggcacccacagcgacacctgcggacggaggtggaggcgcacgcggctgtgtatgctactgggcgctgctggtaccagagtagggccagcgggggcagaggctgatttcagggctggtcctattaacctttaaaattaaaataggccaggcgaggtggctcaagcctgtaatcctcgcactttgggaggtcgaggcgggcggatcacctgaggtaaggagttcgagaccagcttggccaacgtggcgaaaccccgtcactactaaaaacacaaaaattaactgggcgtggtagtgcgtgcctgcagttccagctactcgggaggctgaggcaggagaatcgcttgaacccgggaggcggaggttgcagtgagccgagatcgcgccactgcactccagcctggcgacagagcgagacaccgtctcaaaaaaaaaaaaaaaaaaaaaattagccaggcgtggtggtgggcacctgtaatcccagctactcgggaggctgaggcgggagaatcgcttgaacccaggaggcggaggctgcagtgagccgagatcgcaccactgcactccagcctggggctgcagagtgagactccgtctcagaaaaataagtaaaattaaaataaataataataatcataaagctcacttattgagtgcttattgtatatgaagcatggtgaggaggatattacttccattttacagctgaagaaactgaggctcagactgggtgcagtggcgcctgcctgtaatcccgcactttgggagaccaaggcgtggggatggcttgaggccaggagtttgagacaagcctgggcaacatagtgagacccctgtctctaaaaaagaaaaaaagaaaaagaaagaaaaaagaaaccaaagttcggggaaaacaatccttttgcttaaactgttccttgtcttctttcccgatcccaatgattcagatgccaagtggcctcccctcagccactccctcttcttttctttgtagcattcttggctttccggtataattttgtgcatttacttgtttattgctcagctccttgctctaagcacaaccgtcctcagtcgaagtgattcatgatgactccccaggggaaaaaactggtcctcagggaggaaaaaaatcttagatattgtggtcttccaaagccagctctatcagacagcatttatccctaagtatttagtttctgcctttagggagatattaaatgtaattaaattgaaattaatttagttgatgtaaattcaattttaggataattcgggttttctcctaagaagggtgataatgaacaaaaaacgtttgacaatgtcggacgcagtggctcacgcctgtaatcccagcactttgagaggccaagatgggcagatctcttgaagtcaggagttcgagaccagcctgggcaatatggcgaaaccccgtctttactaaaaatacaaaaattagctgggtgtggtggcccgcgcctgtaatcccagaactttgggagactgaggcagaaggatcacttcagccctggaattcgaccagcctgggcaacacatagtgagaccccccatctctaaaaaacaacttttttttttttttttgagatggagtctcactctgtcgcccaggctggagtgcagcggcgcaatcgcggctcactgcaacctctgccttccgggttctagtgattctcctgcctcagcctcccgagtagctgggattacagatgaccaccaccacgccgtgctaatttttgtgtttttagtagacggtttagtagagacgggggcccacctcggcctcccaaggtgctgggattacaggtgtgagccactgcgcccggcccttaaaaaaattttttttttttaatcagctgggcatagttctgtgtgcctgtagtcccagatactcaggaggctgaggtgggagaacagcttcagcccaggaggttgagccatgatcatgcgactgtacttcagcctgggtaacagagagagaccctgtctcaaaaacacacacacgcacacacacacacgcaacaaaacaaaaaataacttgtaagggagaatgccctgagaaaaataaataagaagacaggaaaaaaaagtttatgcttttttatcctctgagttgtgagtgaggaggccactcaagtgtttggaatatcaccaacttttcttgtggaaaaaattattctagaagcctgtagagagccaagtggaagggaaaacattagctggagagcaggaaagagaggcacgccgctgtggcctttcaggagggtggcctggctatattggtgaaaatatgaagctggtccaaaggactgataaacatttttacaagcttactcaaatgtactctgagcaacacaaaatccaaacaacccagcagattgggcaaagcttcaaaaattcgatatcaccccgtggtagtaaagatgttatagggaaacaggctgggcacctgtaatcgggaggccgaggtgggtggatcacctgaggttaggagttcaagaccagcccctggccaacatggtgagatgccgtctctactaaaaatacaaaaaaaaaaaaaaaaaaatctggccatggtggtgggtgcctgtaatcccagctacttgggaggctgaggcaggagaatcgccattgcactccagcctgggcgacagagcaagactccatctcaaaaaaaaaaaaaaaaaaaagaggaagcgatatataaaatggcatatattacaggaaccaatttgtgtaaatcttcaacagcacatagatatgcagatatatgcaaatcatttcctggaaagaaagaatcagaacctgttaatgaggaatgctttggaaagaaggcaccaagaaaggaaatattatttttggacatgtattaatatataatatgcatttatgtaatatatgtgagatgtaacatataaatatatttcttggctgggcactgtggttcgtgcctataatcccagcagttttggaggccaaggcagaaagatttcttgagcccaggagttcaagaccagactaggcaacatcattgagaccccatcactacacacaaaaaattgctgggtgtggtaatgcacgcctgtagtcccagctacctgggaggctgaggtaggaggattgcttgagcccaggaggtcaaggctgcagtgagctatgattgtgccattacactctggcctgggtgacagagcaaaaaccctgtctctaaaaaagaaagaggctgagcacagtggctcacgtctgtaatcccagcactttgggaggccaaggcaggcagatgacctgaggtcaggagatcaagaccagcctggaaaacgtggtgaaaacccatctctattaaaaatacaaaaattacctgagcatgttggtgcatgtctgtaatcccagctactcaggaggctgaggcaggagaatcgctggagcccaggaggtgaggctgccatgagccaagtgctgggattacacaggtgtgagccacatcaaggtttgggtgcaagagtacatctggttatagattacagaagcataataccctgaccccattagatgttattttatgtgtaggaaaaggtttgaaccaggtccttttttttttttttttttttgagatggagtctcactctgttgcccaggctggagggcagtggcacaatctcggctcactgcaagctccgcctcctgggttcacgccattctcctgcctcagcctcctgagtagctgggactacaggcacccgccaccacgcccagctaatttttgtatgtttagtcgagatggggtttcaccgtgttagccaggatggtcttgatctcccgaccttgtgatccgcccaccttggcctcccaaagtgctgggattacaggtgtgacccacccgtgcccggcccaggtcctttttttcttttttcttttttttttgggggacggagtcttgctctattgcccaggctggagtgcagtggtgcgatctcagctcactgcaacctccgcctcctgggttcaagcggttctcccgcctcagcctcctgagtagctgggattacaggcatgcacaccaccacacccggctaattttgtatttttagtagagacgggggtttctccatattggtcagggtagtctcgaactcccgacctcaggtgatccgcctgcctgggcctcccaaagtgctgggattacaggcatgagccaccgcacctggcacgcctttttttttttttttttttttttgagacagggtctttctctgtcacccaggctggagtgcagtggcacgatcacagctcactgcagcctcaacctccccaggctaaggtgatgcccttgccctggtctcccaaaatgctgggatcacaggcatgaaccaccgtgcccagactcatttaaggaatatagtgactcgggcaagggacatggtgtgccctgtgctctgtcctgttttgtcttcaaagccttgttctgtagagctgcgcagacgtgtctcacgtgtctcagagtcaggggctttgtgaaattacgctggaaagcagaattgagcaaacccagcttaacattagttactttttctcacattttcacaacaaaatatcacagactaggaggcttaaacagcacacatttattttctcagttctggaggctggaagtccaagatcacagtgtcggcagggttggtttcttctgaggtgggggcaccttctccctcggtcctcacgtggcctcctctgtgtgtgtctatgtcccaatctcttcttctaaggacatcagtcatattggattagggcccaccctaatgacctcatttaaactttttttttttaattattttttttaaaggtgaagtctcactctgtagtccaggctggagtgcagtggtgcaatctcagctaatggcaacctccacctcctgggttccagtgattctcctgcctcagcctcccgagtagctgggtctacaggcatgtgccaccacacctggctaatttttgtatttttgtatttctagtagagacggggtttcaccaagttggccaggctggtctcaaactcctgatctcaagtggtttgcctgccacggcctcccaacgtgctgggattacaggcataagccaccacacctgggtttaattttctctctaaaggtcctgtttctgctgggcacagtggatcacgtctgtaatcccagcacattgggaggccaaggtgggcggatcccttgaggtcaggagttcgagaccagcctggccaacatagcgaaacccctgttgtctactacaaatacaaaaattagccaggtgtggtggcaggcatctgtaatcccagctgctcgggaggctgaggcatggcaatcccttgaacccgggaggcagaggttgccatgaaccaatactgcgccactgaactccagcctgggcgatggagtgagactccttttttttttttgagatggagttttgctcttgttgcccaggctggagtgcagtggcatgatcttagctcaccgcaacctccacctcccgggttcaagtgattctcctgcctcagcttccctagtagctggaattacaggcatgtgccaccatgcccagctaattttgtatttttagtagagacggggtttctccatgttggccaggctagtcttgaactccaaactcaggtgattcgcctgtcttggcctcccaaagtgctaggattataggtgtgagccgccgcacccggccaagactttgtaaaaaaaaataaaaataggccatgcgcggtggctcacacctgtaatcccagcactttgggaggccgaggtgggaggatcacttgaggtcaggagttcgagacgagcctggccaacatgatgataccccatctctactaaaaatacaaaaatcagctgggtgtggccaggcatggtggctcacgcctgtaatcccagcactttgggaggccaaggtaggtggatcacctgaggttgggagttcgagaccagcctgaccaacatggagaaaccctgtctctcctaaaaatacaaaattagctgggcgtggtggcgcatgcctgtaatcccagctactcaggaggctgaggcaggagaatcgcttgaacccaggaggcagaggttgtggtgagccgagatcctgccattgcagtccagcctgggcaacgagaaggtaactctgtttcaaaagaaaaaaaaaaaaaacagctgggcgtggtggtgcgtgcctgtaatcccagctactaaggaggctgaggcaggagaatcacttgaacccaggaggcggaggttgcagcgaaccaagattgcgccattgcactccagcctaggcaacagagactccatctcaaaaaaaaaaaaaaagtaaatagagataaaaagaaagaaatactaaattgatggacatgcagatgtggtaacagccaaaaaacaggggcagaaaggagacgtggcaatgtccttactgtggtttttctagggaagtagatgggcacctcagccttacatgtttatttcatttaaaaaacagccttccactatgaactatggtatggtggttcctcaaaacattaaaaatagaaccaccaaatgacccagcacttccacatctgctttatacttacaagaattgaaatcactggagaccagcctgggcaacagagtgagacgccatctttacaaaaaataatcatatattaaaaggaaaaaaaaagaagccaggcacggtggcttacacctgtaatcccagcactttggaaggatgaggagggacgatcattggagcccaggagtttgagaccagcctgggcaacatagcaagaactcatctttactaaaaataaaaataaaaattagttaggcgtgatggtacatacttgtagtcccagctactccagagactgaggttgggggatctctggagcgaaggagttcgaggctgcagtgagctatgatcgcatcactgcagtccagtctgggtgaaagaacaagaccctgtctctaaaaagaaaagacaaggtttctaattcttacaccaaaatacatcctcaagttgttcttggtgaaggatcgtatacctgaaaatgtgaccactgaaaaagtgggattaaaaacaaggaaattcaggccaggcgcggtggttcacacctgtaatcctagcactttgggaggctgaggcaagcggatcacccgaggtcaggagttcaagaccagcctggccaacatggtgaaaccccatctctactaaaaatacaaacattagctgggtgtgatggcccatgcctgtaatctcagctactcaggaggctgaggcaagagaatcccttgaacccaaagatggaggttgcagtgagcagagatcgcgccactgcactgcagcttgggtgacagagtgagactccatctccaaaaaaaaaaaaaaaaaggaattcaacaagttggttagattcaaaaaacacagtttacaaaatcacagccaatacaaatggagcatctctccataggcaaaggaccatggtttagaaatcaagaaaacatcccatttatattagtaatgaagggactaaatacttaggaatcaagttatgaagtctgcaagatctggatgaaaagctgtggacacaaaggaattcctgaacaaacaggacaaaccctgttcttagaaaggaaggcttgtcattaacatgtcaattcttccagaagtctgcaaagttaatgaaatccctataaaacacctgcttgacttttagcggctgtgccagttctaaagtttcaatccagtcattcaactcctagaaaagtagcctagacgtggatacacatgtgtatacaaatctatgtccagccatccctcggtatccccaggggattggttctaggaccccatgtggtaccaaaatcagaatgtgctcaaatccctaatataaaatgtcataggccgggcatggtggctcacacctgtagttccagcactttgggaggctgaggcgggtggatcatttgaggtcaggagttcaagaccagcttgaccaacatggtgaaaccccgtctctactaaaaatacaaaaaaattagccgggcgtggcggcacatgcctgtaatctcagttacttgggaggctgaggcaggagaatcacttgaacccgggaagcagaggttgcagtgagccaagattgtgctactgcactccagcctgggcgacagagtgagactctgtctcaaatataaaataaaataaaataaaataaaatggcatagtatttgcatatacgctacacatattctcctgtgtacactactttttgacagagtcttgctttgtcacccaggctagtgcaatctcggcttaatgcaacctccacctgctgggctcaagtgatcctcccatctcagcctctggagtagctgggactacaggtgtgtgccaccatgctcagcaaatttttgttattttttgtagagaaggtgtttcgccatgttggccaggctggtcttgaactcctggcctcaagtgttcctcctaccttggcctcccaaagtgctgggattacaggcatgacccactgcgcccggcctctcctgtgtactttatgtcgtctctagattatttgtaatacctgacataacgtctacacgttgctttattctcatggattccatgtagtacttggtaagtggcaaatacaagttttgctttttggaactttgtggaatttttctgaatattttaaatctgtggttggttgaatgccagaggtggaacccttggatacaaaggcctgacctgcatcacaattcaatctactgctcttgagactgtagttgtttccaaacaatataaagaaaaaaagttcaaataaaggctttctaagagatttattgtataacatagtgagtatagttaatatattcttgtccaggcgcagtggttcatgcctataatcccagcatttggggatgccaaggcaggtagatcgcttgagcccaggattctgagaccagcctgggcaacaaagcgagatcctgtctataaaaaaatataaaaatcagctaccaggcatggtagctcatgtctgtaatcccagcactttgggaggccgaggcaggcagatcgcttgagcccaggagtctgagaccagcctggccaacatggcgaaaccccatctctactaaaaacatagaaattagccaggcctggtggcaggcctgtaatcccagctactcgggagactgaggcatgagaatagcttgaacccaggaggcagaggttgcagtgagccaagatcgcaccaccgtactccagcctggtgacagagtgagattccgtctcaaaaataaataaaaataaaaataatgattagctgggtatggcggcacatgcctgtggtcccagctactacagaagctgaggtgggaggatcacgtgaggccaggagtttgagaccaccctgagcaacacagtgagaccccatctccacaaaaaaaatgtaaaacttagctgggcatggtggcatgcgcctgtagttccagctactcaggaggctgaggcaggaggatcacttaagcccaggagatcaaggctgcagtagaacatcgctgcactccagcctgggcaacagagcaagatcctgcctctaaaatatatatatattttttttaaaaaggacaaaactgatacacatattaatgacatggatgaatcccaaaggcatttatgctgaaagatctgaaacacaagagcccatgctggcctgaacaggcaggtgtcatctatggagacaaaactggatgggaggctgcccagggactgggaagggggagatcaagtgggaagaggcacaaggtgacctgaggtgacagagacattctctatcttgataaggatataggctacagtgctatgttcacttctcgaaatttaagctgaacatttaggactcgcatatttcatattctaccccaattttcaaaaatagaggaacaagagagattcctaggtaagacaaccttcgaggtgcaagacagtttatttttttttcgagacagtctcgctttgttgcccaggctggagtgtggtggtgtgatcgtggctcactgcagccgccgcctcccaggttcaagcaattctgcctcaatctcccaagtagctgggattacaggcatgtaccacacctggctgatttttgtatttatactagagatggggtttcaccctgttggccagggtggtcttaaactcctgacctcaggtgatccacctgcctgggcctcccaaagtgttggaattacaggcgtgagccaccgtgcccggcccaaagcagtttatttttgagacagggtctcgctgtgttacccaggctggagtgcagtggcacaatctcggttgcagtgagccgagattgctactgcaacctccacctcctgggctcaagcgattctcccacttcatgctcctgagtagctgggactacaggcacgtgccaccatgtcccactaagttttgtaaaggcaatcttaatagacactatcaccaggcgtggtggctcacgcctgtaatcccagcacttttggaggccaaggtgggtggatcacctgttgtcaggagtttgagaccagcctggccaacatggtgaaaccccatctctactaaaattagctgggcgtggtggtaggcgcctgtaatctcagctactcgggaggctgaggcaggagaatcgcttgaacccaggaggcggaggttgcagtgagccaagatcatgccattgcactccagcctgggcaacaagaccacaactccatctcatttaaaaaaaaaaaaaaattgacactattggctgggtatggtggcagatacctgtaatctagcactttaggaagccaagcgggaggatcgcttgaggccaggagtttgagaccagcctaggcaatatagtgagactgcatctctacgtaagtaaaaattaggcctggtgtggtggctcatgcctgtaatcccaacactttgggaggctgaggtgggctgatcacttggggtcaggagctcgagaacagcctgggcaacatggtgaaagcccgtctctaccaaaaatacaaaaattcgccaggcacacgcctgtaatcccagctacttgggaggctggggcaggaggatcccttgaacccgggaggtagaggctgcagtgagccgagattgcgccattgcactccagcctgggcaacaagagtgaaactccatctcaaaaaacaaaacaagaattagctacatatgatggtacagtcctgtagtcccagttacacggaggcaggggatcacttgaacccaggaggtggaggttgccatgagccgagatcaggccactgcactccagcctgggtgacagactgagaccctgtctcaaaaaaatagaaaataaaaaaagataataggtacatgggtgattgttttctcacaaggtcacactatgcattagtacaaagattcagttgtcttgatcaaggtgccttggaatccagaaaaagaaaactcattatactcattatatactttaaaatgaattttttagcttaaaatagcagcagaaagtatatttaaaaaaaaatctcggatgggggaactttaccatatgtcaagctgagctgttgtactttgctgtgtgcatttgctatcagtcttattcaaaaaataagctgagatccccatttttagtccttacaaaagtgattcatgtgttaaaatgggaatgtcagaaatgtggaagaagatacatgtttaagatctcttgctggggggaggaaaggcgtttctaaataggctacaaaggccgggcacggtgactcatgcttgtaatgccagcactttgggaggatcacttgaggtcaggagttcaagaccatcctggccaacatggcaaaaccctgtctctactaaattaacaaaaattggccagatgtactggcaggcgcctgtaatcccagctactcaatccctgctacttgggaggctgaggcaggagaattgcttaaacccgggaggcggaggttgtggtgagcagagatcacaccactgcactccagcctgggcgacagagtgagaatccgtctcaaaaataaacaggctacaaaaaactaagagtgacaaatataaattgacttcctaaaaatgggaggtctctgtatggcacagacatgataagccaggatgactgagcaggggcagtcatcccaaatgcccagggagctcccagcaaagacagtcatgtggccatcacagagaaacggtacatccagtggccaaaggacacacagaagtgttatgtcactattaaaaaatgctggccaggcatggtggctcacacctataatcccagcactttgggaggccgaggcaggcggataacctgaggtcgggagtttgagaccaccctgaccaacatggagaaaccccgtctctactaaaaatacaaaattagttgggtgtgatggcgcatgcctgtaatcccagctacttgggaggctgaggcaggaaaatcacttgaacctgggaggcggaggttgcagtgagcagagatcgtgccaccgcactccagcctgggcaacaagaacgaaactgtctcaaaaaaaaaaaaaaaaaagctaatgggaggctgggtgcagtggatcacacctgtaacccagcactttgggaggtccaggtgggcggatcatgtcaggatttcaagaccagcctggccaacatggtgaaacatcgtctctactaaaaatacaaaaattagctgggcgtggtgatgggcgcctacaatcccagctactcgggaggctgaggcagaatttcttgaacccaggaggcagaggctgcattgaacggagactgccccactgcactacagcctgagcaacagagcaagactgtctcaaaaaaaaaaaaaaattctttggaaagaaaaaaaacccaactaaagaggttttgcttggggatggggtggccggggctccaagggcagctcagtggtgacttctctctccttattccaccagttgcagcacagagctctgcctcatggtcacaggatggctgctccactgccaggcatcacaacccacttcagaccaaagaaggcctaccagccacggggaaggccagccaagacttcctttaaaaggctttcctggaagctacactagcaagttccatttgcatgtcatggggatcaactcacgtgactcagttctgaacaaacacagacagacacacggagtgtctagcttcaaacgtgctagcttcaaactccacgtgggtcgccttcagcatggaagagcttgttcctgtctgacctcagccagaagtcccgtgcaaatcacgaatacccacccagggtggtttataggagagatttatttgaagaaatattacaacatataaaaactacataaagtcttaatttccactcatacagtggtagatttgatataatgcataataaaaaacttttaaaatccagaatgcacaaagtactgcacaatttgatcactaaatcattagttgataagcgaacctcacacaacagcttcatgtcagccaaggccacaaacaccatgtaccacacatgtgaacggacagattgacatgttaaaaacacaacatcagtgcatgttggggattcctggtgccagaaacaggggtgacgggagggcagaactagtccttagcagcttcctcctcctttattttagctgaagggaaataaaaggaaaagtcactctggggaacacgcccggtgtcacgccacttgacaggcgagtaacagacatggaccatcaggaaacattaacgtactgatgttaacagctgacccaataagtggcagagtgctaagggaacgttcacggagactgaacactcctcaaacggtccccagagggttctagacccagaggctcaagtgagcagctgaggcaggtgcctgctgagccaaattcaccgagcaggagtgagggaaacggccccagggccagcccagcagccaacctgaccaaaggcctgctgtgtgcagcacgcctgctctaagcacttgacacgtgcaactcactcaatcctcacagcagccccttgagaaagatggggccacgaacgtgggtaggtgacccgcctgagtcccagagcccaaaacggtggccagcaactgcccccacatgtacccccagagggcagtcaggccccagaggaagcctggcccaccccaccatacctgaggcactctctcgggctttggccaacatacaaagcttgatctccaagccaatggctttggccaggggcggtggcacggcattgcccacctgcaggaggggagaagggcaatgcctgatgtggacacccaggcccaaggcccgggggcaggtgtactgccagcccctgctcagatggaggacaacctgggcattgcaccccttggggaagggttctggtcctgctcacatgggcccaaaacccttccagcacaagatccttggaccctccaactggcccatcatcccgccccacagccacaagtcactgggcctttgaagagcttcagaaagacttgagacaaagacacgtggggctgggagcagtggctcacgcctgtaatcccagcactttgggaggccaaggcaggtggattagttgaggccaggagttcgagagcagcctcgccaacatggtgaaaccccgtctctactaaaagtacaaaaactaattagctgggcatggtggcacatgcctgtaatcccagcacctcaggaggctgaggcaggagaatcacttgaaccctggaggtggaggttgcagtgggcagagatcatgtcactgcactccagcctaggggacagagtgagaccctgtctcagaaaaaaaaaaaaaaaagacaaatgggccacctagacacgtttcgctcccagttaagagtggctgcttccctggccggcgcagtggctcatgcctgtaatcccagcactttgggaggccgaggcaggcggatcacctgaggtcaagagttcgggaccagcctggccaacatggtgaaaccccatctctactaaaaatacaaaaattagccgggtgtggtagcacatgactgtaatcccagctactcaagaggctgaggcaggagaatcacttaaaaccaggggggtggaagttgcggtgagctgagatcacgccacttcactccagcctgggcgaaagaacaaagctccatctcaaaaaaaaaaaaaaaaaagagagagtggctgcttcccgagaaccagattcggggggaggggtgaaatgtggttttcacaagaaccgtggacactggtttttaagcaatgcgcgtgccctatgatgaaaatacacttaactgagactaactcatagactaacttgttaagccaacccgacacctgagaagcaggtaggaattaaggtgctagttcatttgaacctacagcgagtgagctgtcgccaccatgggttttagcctgctcctttagcgcgacggactgtccttctggctcaatctctgcctcaaaaacaaacagtaaggaaccagcatagggacgcagcctgactcggatgtctcagcactgtccctcctgtgggccgtcttcccactgagagtgatggggctacccggcagccagcaggcgtcctcccggaagtgactgcgctggccccagccccacctggtgacaggcacagaagcctccttcctgtccagacccagcgggcgccgccccactgacctgccggtgcttgtccaggatgttgccgaagagccggtaggtgtcagggaagccctgggagcgggcacactcccgcacgctcaccacacggtgctgctctgggtggagcacgcggccctgggggaaagaggcgcggtgggcgagggcagtagcacccaggccgggtcaccgtcggggacagggagggaaatggcactgtgacagcatacggccatggccttggcctatgagcttgtcccgtggacgtggaggggcaggaggcagaggccaggtgcctggggtcctggggtgctgtcccccacttggctaaacccacacttccacctagttaggccgccaagtacagggcctgacccaggccctcggatgccccctccccacctacctgcttgcccatgggctcggggttggtgacggttgtgctgaagaagccgtcccactcgagccttccatagaggccagcccagtggttgtgccggttcccggtgtggggcaggcaccaggggatgagggtgttgaactgcctggctgcggggtcgcaggctttgccggctggaagacaggacagtgatgaggctgcagttgtgggatggggtataggcttgggacagtggctcttagagctttgggaggcagagatggcacctcctgtgcaaggggccccctggggtggagcagccaacaatcctcgttctctgggcactgtttttattattagtattatatgtctcgctctgttgcccaggctggagtgcaatggcatgatcttggctcactgcaacctctgcctatggggttcaagcgattctcctgcctcagcctcccaaatagctgggattataggcgtgcgacaccacgcccggctaatttttgtagttttaatagagatggggtttcaccatgttgggcaggctgatctcgagctcctgatctcaagtgatctgcctgccttggcctcccaaagtgctgggattacagaggtgagccatcgtgcctgacctgcttttattatttatttattgttttttttttttctttttagagacagggtctcactctgtctcccaggctggagtgcaatggcacaatcacagctcactgtagcctcctcaacctcccaggctcaagtgatcctcccgccttggtttcccaaagtgctgggattataggtgtgggccatgaacccagcctgcttttactactcaacatggtcagcagctaccttctctgggacacccaggcttggtgtgtctgtgccctgccctggcctccaggttcacaggccaaaggcccagggctctgccttccttcccctcagcccaccgggaaccacaacttacaggacccaccttccacgcaggagcagaccccacggagggccccagagctgctgcggccgttcttcctgtcatggtgggtataccgcagcttcctggccatggtgccgtctgagagccgcacctcgatgttgggcagatcgcgccagtctgaccctggggccaaggggatgtgccgcatgcgggcagccaccaatgcactcatgtcctgaaagagtgtggggggcccagctgtcacctcatgtgagcagcatccgagcatccatggtgggctgggagctgggaacaccatggtgaccaggaagccccctggggctcacgcccatcgggaaagagacagtcagggatatcgcacttggctcgaggccacggcagggacctgaggcagcgcaggtgtaggagagcgtgggaatctaagctgagcctttagggtgggggaaggggagtggtgccaggggatggtgaaagggctggtcttggcatcctgggaaaacatgcggggagaggcagcaagggggaaggcagtggtgggtgggcagtggcttgacaccattccagaccaagtccaggactgcgggagctctgacacttcccatgaccatgcaagagagaccaggggtcacacaaaggctgaggactcgggaggaggagcctgggatcagattccatgtctcccctgagtcttgggcaggctgactgttcccacgaggctgctgggctgggcctcgaggaggagccgctctgtcagggtgccattaccttacagatgtggtccctgaggatgggctggtactgtgcgccccggagctgcctctggaaccaggactgaggctccccgttgtaggagatctccagtgccgaggctccattccgcacctccggcaggtcggacatcgtgtctcgcaccgtgatggtccggaaaggacccgagctcaacctgcaacagaggaggaggtcaacacctctggagatgcacgcagcagctgtcccctcatcacaggtgccaccccctgcctgctcagatggccttctcccgagatcacagcactgcccgaggtcacatgggtggcagtgtgcctggatgccatctggaaggggggatggggctatggcgtgggctttgtggatgaccacagccaagcatgcggctggccgctctgcacatgctatctactagggaagcagatgatgcagggtcagaactggagaccacaggtggcagagtgccatgtggcagagcaccgtgtggcagggcagatgctgtaccatcctctcctccccaagcctcaccagggagtactcacgggccccatgagctactgaggcctgctcggcagtgtgtggaggagcgacgggggccacctacctggttatgttgctcacaaacttcttgtcatccaccaccacgctcagctggcaggcccggggagcaaacacgtgcagtggctccgggaacagagggagcttctctccaggggccgcggccaggatgatggcccgcctcctagtctgggccacgccgtactgaccggcctgtgggggagaaggacggacaaccccaccgtcagtgggacactcccaactggactggccagacccaggcccagggtcagcagcctgagtcgggagtggctggccaatgcggagtgcacttgcagaaatccccagttacctcagcaggcgtgctcctggtcagaggagtttggagcagataaagaacaaaagcagctgagcccaggggacagccactggggaaggtgggagcaaaccctgcggggaagtccggccagctctgaaagcactgcaagggccccaaggtcttagcactcggggagaacactggagaccaggagccctgtcgcttccctgatggctgtggtcacaaggacagagaacgtggctgcaacaagtcttgtctggtgagcctgagtcgccctgaggctgagctaggggaccgggtagccaagtgcttgcccacttaggcagacatcctgtgctagcatctggatagctgtttcatttttaattatgccctcaattgctgagctgatacagagaggatgggggatgcttttcagataaggcctgggccccacagactatgtccatccctgtccctgcagacacagccacctggagtgcaaccctcggccatctgtgggggtttgtgtgcgcagttacccagagcaaaactgtcttttaaaccaatcgaacagctgccgcctacacatggctctgcgcacctcacttcccctcccgctctgtgcagactcagccattccacagtgctccatggtgggctgctcacccttccccatcgagggaaaggagccaggagctgcatggcgagaagcccattgtagccagccctcccaggcatgttcgagaacacagctcaagagacactagcggtggacttgctgggggccggctgagcacgcatctcccctgactccgccagtgggacagagcaccatgccagcctctgctgcctggatggcaggcctatgccattgaaccctgccttcagtaagggatggctggctgctggccgggtcacgtgctggccacatctgtctgcccgccccagccccagggcccacctgcagcacgccgaaggtgcactgatagcccatgcggaccaggcagcggagggtgagcttcaggaccatggagcgcttgaaggagacaaagttcctgacattctccaggaggaagaaccggggccggtagtagtcgcagtagctgtagggggcaggagagactgcaggagtcacctccacagacagagggaagaaacgacccactgtgccggaagcccctcacgaatgttatcaaagtctctccctggtgagagctgagctgtgagcttccggggggcagaggcctcagtgcagggcgaaaatgaccactgctgacatgcggcacagccccgggccgtctggcaacactggggggcttctacccgtttacctgaggaaggaaaccaccagagagtttttgaacttggagtaggtgcgcgaattgaagcggttcatgccgctgaagccctggcagggcggcccgccgcacagcatctccacgtctcccttctggggcagccgctggccgcgggagttggtggtctccccagccatgaccagcttcagcaggatgttgcagtcctctgtgaacactgtggagccggggttgttcagccggaacgcctgggccgcagggtcccacatctcgatggcccacagcgtgtcagagatgcctggcagatcaagcacgaagccatgctttcaactctccagaagatttttttttttttttgagatggagtctcgctctgtcacccaggctggagtgcagtggtgtgatcttggctcactgcaagctctgcctcccaggttcaagcgattctcccacctcagcctcctgagtagctgggactacaggcacacaccaccacgcccagctaatttttgtattcttattagagacggggtttcaccatgttggccaggatggtctcaaactcctgacctcatgatccacccacctcggcctcccaaagtgctgggattacaggcgtgcgccaccgtgcctggcctcggaaggagattcttgagtcaggaaggtgaccggggttggaagtcgtttcaggtagcacctgcccggtctgggctcaccaggtattcagagatggagcctacgggcgctcacctgcttggtggaatccctccgacaaccccccgcagccagaaaacacatccagggtccgcagcttgggcagcttgatctctatctctggctcgctcggctcacaggcttgggacttgggcttgcccttccctgggggagagaggccagaggctaaacccgatcctcagagtccaagtccaccttgctctcaagcgccttgttaactcaggcggcctcgctgtcccagagtcagtaacaccagaggtggttttacactgagggattcacaggcagcctccaagttacagaagaataacttgaaaagaaactcatacaatgacgtaccttttcccttgcccttccctttgtttccagggctacgggcatggttgggaggatcttcaaagcttttgctctttgcattataggcctgaaaaggagagaactgcaatcgtttgggagagaaacgcactgtcccctctctaacgcagactagtaagaaggcaatttgatagtcacttaatttctccctcagtggggccatgaccaattagccaccaataagagtagtttgactttgctacaatagaaacttaaaacaatccattttattaatactaacatttgatctggctgacactgaaatgcctattacaagcacttgagagtaccttctagaacaggaaaaagtgctatgcagaatctgctgtccaattgggctacctcatccatgcctgggagaacgtggatgtatcgttttaaggtaacaacacggaaaggccaagccccaacaatttacaagtcatgagcttgatcagctgactcgtgggccctctccataacgagggccacccgcacaggcatgtgggctgggcctggacgtaggcgcctggcccaagggacccaggagcaggggcaccttctccaactcatactaagacaccagtcaggctggtggaagctgcctcatggtcctcaacgttcagttgcaccaagacactaaaacgttaggttctctaatgacgtactttttaaaaaccaggagtgttaaactccgggaccacttgaatctcatacaacttgtgctctggagaaccctgctcagacccccgtaaagctcctgcagaacagcttcacgtcagccaaccacccacttcttacaaaagctgaaaccctgcagccaagccgccttgtgtataacccgacatcagactccttctggccaactttgaccccgaagccttccctctagcaagcaggggcaccacctcgaggaagtagaagcggttggggccgcccatggagtacacctggacgcactcgggcaggtcctccccatactccacggtgcagcggccctgcacagccttgaagtccaccacggcctcctcgtcgctccagtagagcaggttgatgtctgcgtggtagctcgctggagtggacttgtgggtgttctcaggcctgcgagcgggagaggcctcgttaggagctctcctttgtggtgagcttatgctgaattaaacagtaccatgttcctggggtgctcagggaactgcagggtaaagaccccctagttcgagaaccgcagggtaaagaccccctcagttagggaactgcagggtaaagatatctcctccccacactggggaactgcaaggtagactcccccccatttagggaactgcagggtaaagaccccccctagttagggaaccacagggtaaagatcccccaagttagggaatcgcagggtaaagacccctcccagtaagggaatcacagggtaaagatatcccctcctcacattagggaactgcaaggtagattcccccacaattagggaaccgccaggtaatgacccccgacccagttgggaaccgcagggtaaagaccccccagttatggaaccgcagggtaaagacctccccagttagggagtcatagggtaaagacccccctacttagggaaccgcaggtaaagataacccctccccaaatgagggaactgcaaggtagattcgcccccaattagggaaccacagggtagagaccccccaaccattaggtcagcttggctgcttgctctgcacgcctggccctgccctgctgtgtccgcctgccggtagcagcctctcgagtgtgtttctctcacctgtaccactcacagcccttgttttatttcctgttattacaaaggcttcaggaaatctttgatctatgttagctaagaggtgaggcaagtgtatagcttcctgtacaggctagtttcaggttaatgcctaatcaccgcaagttactcgggtcttagaaaaagaaaacgtaataggccaaaagcttaggaaagagaaaaaatcccagagacagaaaggaggacctgggaagaggtggggacagcgggacagaacctggacagtcatagatggagcttgggaggttctctgggggtgcccaggcactctacccgttttttcttttgagacggggtctggctgtcacccaggccggagtgcagtggtgggatcatggctcactacagcctcaaattcctgggtttcagtgatcccttcagcctcagcctcccaagtagctgggattacaggcgtgtgccaccacgcccagctagtctttttttttttttttttttggtagggccggggtctcactacgtttcctcaagctggtcttgaactcctagactcaagtgatcttcctgcctcagcctcccaaagtgctaggattagaggcgtgagctacagtgcccagccagcttaaggatttcttttggaaaaagggctctgcaacattaaaataaggacctaaaagtgagggctgggaactagaattctagtcattatcagtgcccaccgataatcagaaacacttggaaaaacagctacttcaacctaactcttagaacaactgtgggtgctatgccacaaccttgtttcaggcagagccttctagaagagtctgtggcctcgtggaagaacagaggcctctgctgacctgtagaacttgttgacccggattttgatgtcagtctcattgggcctgccgttgctcttcttgggacagaagatctctttgatccggccaattcggtagggctcaggggcatccaggttgctgcctttgatgtagtcggagtatttccggtagtgctctgggtacaggtcctcatccacgggctccttccgtgggcgtttcacgggactggacagcttgatgctgcagagaagcacccacttgacatcaatgaaccttccaccttgcagtggtcagtcaggcatgactgaccagtgaaaataaccatttaaagtcaagcacctgatgaattaaggtaggtgtgtaccctaagaaatgatttaggctgggcattgtggctcacgcctgtaatcccagcactttgggagaccaaggcaggtggaccacaaggtcagaagttcgagaccaccctggccaacacggtaaaaccctgtctctactaaaaatacaaaaattagccgggtgtggtggtacatgcctataattccagctacttgggaggctgaggcaggagaattgcttgaacccaggaggcagaggttgcagtgagctgagattgtgccactgcactccagcctgtgtgacagagcaagactccatctcacagaaaaaaaaaaaaaagatttagctgcagatttagtctcacagtttgaagcacgcattcaccctctgcgcattactggctacggtggtggctgacactgctcaaataccccaggctcctgcctcccgactacttggcatcttgtgtttcctggcatgtgacgtgggcagaagtgaccaaagaggatgtcactgcctggggaatgtcctgtgtgctttcccttgggctcaaacactggcaacttctgactccagcggcccagatatccaagggacacaacaggtggagtcctctgctgacctgtgatgggcacctcgtatgagcgagacagcggctaccgtggtttttgttgagagagtttcactctgtcacccaggttagagtgcagtggcacaatctcggctcactgcaactcctcctcccaggttcaagcgattctcgtgcctcggcctcccaagtagctgggattacaggtgcccaccaccacacccagctaaccctggctaatttatttttagtagagacaggtatgtcggccaggctggtcttggtcttgaactcctgacaggcatgagccaccgcacccagtccagcttctgtggttttaagtcactgtgatttggggttgttgctatgatacaacctacgctaccctgactaaggctctgatctagaagcgacactggaggccaatgtaaggcgccacagggcctgggacaatgggagtgtggtctgactagtgtggaaaagctgttctttgaagaaggcctgccgttagggaagtcagctgtcacgttctccccactaggccccccaggagtctgacgggccccaaaggcgtctctgtgctgactctcccactttgccaggagcaactggcagaaaacactacggggaggtgtccccttcccaccaaggacaaccagagggggtaacgcgccccaactgtgccaaggctggagggaacctgcttctccagttctcataattcacagtaactgaactaaggcaagggagctggggctctaaggaaatggaattgtgagccgggaaggcatctggaaaacgttggctgtaattccaaccacacgctgattcttagaaaaaacacagaatggatcagtgtggaaacgatctgtggctttaggtttttcctggaagagcctcgatcctctgacacagagaagtcatctgatgtgattccctctaaccaagaagtaactcatgtccgttaaacctttactttaagccaggtactgtatggagcactttcaactcactcaacccttcgagccccagcaggcaagatcccactctcccacttcacagtaggggacggagaggaggtgtccttgggcagaggcagaacttgggggtgggcccccagctgtccctcgcgctttatccagtaagttctttttttttctttttttattttgagacggagtcacactctgttgcccaggatggagtgcagtggcatgatcttggctcactgcaacctctgcctcccaggttcaagtgattctcctgtctctgcctctcgagtagctgggactacaggcgcgcaccaccacacccggctaatttttgtatttttagtagagacgaggtttcaccatgttggccaggctggtctcagactcctgacctcagatgattccccactgcctcggcctcccaaagcgctgggattacaggcgtgagaaaccacacccagccaaaccagcgagttgacttttacgctcagctttgctctgcaatagcatcatggtcagtctacacgatttatgttgtctgtttgccacctatgccaacgtgacggctaggacaacagctggtgcggagggattggcaatgtctgtaaggagggggacaccacaaagccagcctggctcagcctggagcgccctggccccggctgctccgagggggcacttacttgaacgtgaaggcctcagggggcaggtacacaccatcaccaactcggtacaggatgccgttcttggtggctgagtagtagaggacccggctatccaggtcctcgagctgctccaggaccctggggatttctttttgcctcatctcagccagacgggcacagctcacacagaatctgaaggaaacaaagggacagaaacataaggccctgaggtggccggcagtggccgcagcagctactgccagcttaatccagagactctggtaaccaagaggaaaaaacatttgcagatgctagaaggaagaggtggctttcttgtgctttgtgttgacattttgaaggcacttatttgagaccaaagcccagagagaacatagcaagaaaatcaggcaacttttgagtcattgagacaaaaaccctaagatatcaatgaacagggtctagaatatggttaagaacacaccacgagcaacagtcccgagtggctcagtgaggaactcaatccagcagagactcctactgttctctccataaaggctcaacaggtatttgaggaaattcaacattattcttgactagtaagcccttaaaggagacttgaagatggccttaaaaatagagatcaaggcccagcatggtggctcatgtctgtaatcccagccctttgggaggccaaggcaggagggtcgcttgagcccagaagtttgagactagcctggccaacacagtgagaccccgtctctacaaaaaatttttaaaacattaaccaggcagggtggtgcatgcctgcagtcccagctactcaggaggctgaggcaggaagatcacttgagcccagcaggtcgaggctacagtgagctgtgaccacaccactgcattccagcctgggtgacagagggagaccctgtctcagataaataaataaataaataaataaataaataaaagaggttgggtgataaataaataagtaaatgaggttgggtgcagtagttcatgcctgtaatcccagcactttaggagcctgaagggagcagatgacccaaggtcaggagttccagaccagcctggccaacacggtgaagccctgtctctactaaaaatacaaaaattagccgggcatggtggcaggcgcctgtagtcccagctacttgggaagctgaggcaggagaatcacttgaacccaggaggtggaggttgcagtgagccgagatcgtgccactgcactccagcctgggtgacaagagtgaaactccatcacaaaaaagtaaaaaataaaatgaaaatagagatcaagccaaagctagcacgagacttatgggagaagcacagatgcccccggggagccctcttggcctcctgggtttccctggttgccacctgctcctctgggggtgctggctgctgcttttagttgaaacaagtgaggtacggaggttaaaaagaaggcatggggcattggacattaaaaaataaaagctcgccgggcgcggtggctcacacctgtaatcccagcactttgggaagccgaagcgggtagatcacctgaggtcgggagttcgagaccagcctgaccaacatggagaaaccccatctctactaaaaatacaaaaaaagtagccgggcatggtggcccatgcttgtaatcccagctactcaggaggctgaggcaggagaatcgcttgaacccaggaagtagaggttgcggtgggccaagattgagccactgcactccagcctgggcaacaaaagcgaaactctgtctcaaaaaaaaaaaaaaaaaaaaaattaaaaaaataataataaaataaaataaaaaataaaagcttccctcaaagcagtcacccagttacaaaagaatcgaggacaggtgtggtggctcacgcctgtaatcccagcactttgggaggccaaggcgggcagatcacaaggtcaggagatcgagaccatcctggctaacacagtgaaacctcgtctctactaaaaatacaaaaaactagccgggtgtggtggcaggcgcctgtagtcccagcaactcaggaggctgaggcaggagaatggcatgaacccaggaagctgagtttgcagtaagccaagatcgcaccactgcactccagcctgggcaacagagcgagactccgtctcaaaaaaaaaaaaagaaaaaaaaaaaggaaagaaaagaatcaaataagaggtctcatttacaggagaaaatatctaagaaacagccaaaaacatgcaagagctgggcacacactgaagaacacacgggaagtcttgaaatggcaagacgaaccctgttcctgggtagggaaccctcttacaaagacaacgccaggtcatccacacacttaaagcaactccaggccatctacacacttgagcatcattcatagtcaggctggcctttgacgagcaagagacacaaactggggggccgttggcggaagccaaccagacggaagcacacgggaaaagggagtgatgtgggctgaaagtgcctgctgaccccgagtccagccccagtgctcacttgaacttgttgtcctctgttggctgggtttttggaggggactcgaatctcgcgtagtcttgatcataccacagctggtagaagtaggtcttcccgtcgtccccctccagcagggactcgggatccatgcctcccttgggagataagaatgcgtgtcaggccaggcgcagtggctcatgcctgtattcccagcactatgggaggccgaggcgggtggatcacctaaggtcaggagttcgagaccagcctggccaacatggtgaaaccccgtctctactaaaaatacaaaaaattagctggacgtgatggtgggtgcctgtaatcccaactactcgggaggctgaggcaggagaatcacttgaacccaggaggtggaggttgcagtgagctgagatcatgccattgcactccagcctgggcaacaagagcgaaactcagtctcaaaacaaaaaaaaaaacaaaaaaaaaaccaaattaaaaaaaaatacaaatcaaaacaaaacagaacgcacgtcagcagtgaccctccacgataaggcaggggctcacgagggacaccaggcactcacctccatggcccagttttcggagggggctttgtagatgactttcactttgctgtggatatatgaaagctgcatgtcctcacattcatccaccaagaacagctccagagggtccgacgtggccccgaggactgtgtctgtcccagcgcagaaccagtgggcgtgaaacatctgcccgttgctgctgtcctcccacagcgccgtgaccctggaatcagaagacgggcatggggagaaagttctgacttggccagcagatatgtgaccaagtctatgcaggagcactcgtccttttcagttttcatctagggcaaaaagctgctggtgctattttggcaaaacaggcatctcctacttgatgagaaagtgcatgcagaagtcaagcaaaaagaaagatgcaaaccttgctagatacagcggttttgaggaatcatctggaataacagagacacagtcccccacttccagggtttccgcatcaatgcacaccttcttatagtaactcttcttcccatcagtctgaaaatgagagcataagttcatggaggatcattctgagggtctttgctggccttgacttgcatggtcctctgttacttaaagtaagacatgactcgatttcattaagaagtcaatgaagagttgctgctaaagagaacatcctgttctacaagggcttcaataataagaaaaaagaagaacatccaccttccttggccagatgctgtggccaagggcatccatgtccctcccacttctgctctgccactcgggtcccaggatttgattttaacagcacagcccacaatacctcaccatggtctgtaaggccacagcctgaaccctgacccctgtcctgcccatcatcccctggctcaagccactccagctgcaggggcctccttccttttctccaacaaagtaagctgactgccacctcagtgcagctctcccccaggtcgtgtggctaggtcctacctgaccttctccatctcagcccaggtgtcacctctgcaaggcctcgtggccccagcctcctcccagccccctaccctgcagaggcactcatgccatgcagcagtacccatgtctgtcctcctgcaggggctcagccacggcccaggcagccagcaggtggcaagcctcataattaagtgaactgattgcatctttaatttatggacgtcagagaagcaacacagaggatactcactcctctctctcacactgtggtaaaggaactgaccttcagtgaagccaatgaccacagaacggatgggaggccatctgttggtgccccaaaaagacccaccccacaccagagggggctgtgacagctctcttggaaacaagctatgaggggccaggcacagtggctcctgcctgtaatcccagcactttgggaggctgaggtgggtggatcacttgaggccggagttcgagaatggcctgggcaacatgatgaaaccccgtctctactaaaaatacaaaaaaagttagcctggcatggtggtgcacgcctgtaatctcagctattcaggagggtggggcaggagaatcgcttgaacctgggaggcagaggttgcagcgagctgagatcgtgccactgcactccagcctgggtgacagagcaagattccatcttaaacaaaacaaaacagaaaaacaagctatgagggctcacctgcctgatgcccctagaactgtgtcaaatgcccattttgggacattaggagaactgagccttgtggccacacaaaaatgccttgctggtactgagccatggaacatggtctcttggccagtcccgctcttctcaggggcaaacagacaggtttcttagtgccggggctcaggctgcctgagaggtcaggttggcgagatactagagggcaacctgcttattgggaacatggcagtgagctgaccaaggggctccaagggttaccttgacggcttctccgacccaagagatgcgattcttgttctgtttcttcttcttcccctggtgcatttttttgggtgacggcatctctgggatgttatcatcgacttcctcatcgtcatctgcctccttcatggccatattgggacacctgcaatgtcactggttatacctaaggccccttttctaagtaagaccaaccggggctgttttcttcataacagggacaggtcctgagacaatgcctaacgaaggaatcctggtgctgtcccacacatgcaggcccttctccacagtgcatctgccaccagctggcaagtcctctgccacaggaggaagactcggcctgacctacctccgctcttggcaagcctgcttgctccgtccactgccaccaaatttaaccatgtccttgcaggctttacatttcccacactcaggctgctgacacacctaaaaaatggcattaaaaaggcaaatcagggctgggcacagtggttcatgcctgtaatcccagtatttcagaaggccgaggcaggcagatcacttaaggtcaggaattgcagaccagcctggccaacgtggtgaaaccccatctctactaaaaatacaaagattagccaggcatggtagggtgtgcctgtaatcccagctacttgggaggctgaggcaggagaattgcctgaacctgggaggtggagattacagttagccaagatcacaccaccatattccagcctggacgacaagagtaaaactccatctcaaaaaaaaaaaaaaaaaaaaaaaaaaaaaggaaaaaaaaagggcaaatcacacagcccttactaacaatgagacaaatgatgcattaagacttttaggtctcaaaaaattaaaaaaaaaaaaaaaaagtgagtcacacagcccttagcaacaatgaaacaaacggtgaattaagacttttaggctgggcatggtggctcatacctgaaccagtacattgggaggctgaagcagaggtagatggatcacttgagtccaagagttcaagaccagcctgggcaacatattaagacccccaactctacaaaaaattaaaattagccaggcgtgtgacaaattcctgcagtcccggcaactcaggatgctaaggcgggaggactgcttgagttcaggcattcaagaccagcctaggcaacatggcaaaatcccatctacaaaatgtttttttttaattagctgggcatggtggcgtgcacctgtggtcccagctacttgggaggctaaggtgggaagatcacttgagcccagtaggttgagaatgcagtgagctacaatcatgccactgcattccagactgggtgacagaacgagacccatctcaacaacaacaacaacaacaacaacaacaaaaccaagacttttaaaaatgtgcctatttggctgggtgcagtgcctcatgcctctaatcccggcagtttgggaggccaagacaggaggaccacttgaagccaggagtttgagaccaggcaaggcaacacagcaggaccctgtctctacaaaaaaaaaaaaaaaaagcaatattcaacctcattagaaatatggtaagtgagagaaataaaattcccttcccattctccagatgggttaagaagccagataggtggtgtgaggaaagaagaacgcacactgctcaaatggtaagttggtagaaccattttggagagcaatcttctagatcaaagttaagaatacacacccacaacccagcaacgctacttctaagcagatacactcgcgagaagctttgctcaaggatgctgccacatatttacaatactgaagaggtgcctatcattgaggagtaagttaggatattcatttaacaaaatactacagaatatttaaaatgaaataactagatctaccagtatcaacacgtaacagttacacaaataaaaacaaatgattttagggctgggcacagtggctcacacctgtaatcccagcactttgggaggccgaggtaggtagatcacttaaggtcaggagtttaagaccagcctggccaacatggtgaaaccccatctctactaaaaatacaaaaaaaattagccgggtatggtggcgggtgcctataatcccagccactcgggaggctgaggtgggagaactgattgaacccgggaggcggaggttacggtgagctgagatggtgccactgcactctagcctgggtgacagagagagactgtctcaaaaaaattaaaaaaaaaaaaaaaagattttagaagttataaaacattggacacacgtgtgttaaccaagaaaaataaaataaaaccaaaataacaatggtgaggacatgcaggctcctgttaagagatgccagcggggatcaaaagcaaagccctgaagccagtctttatccaaaagaaagtcaggtaataggtatcaaaatagtcctggtctttgggtcataggactaggaagttagttcctcctgagtgaagtaaacatatattttaaaaactcacagaaagggacgcctcctgagggcctcaaatctaagctggacaaagtgcccacttagatgtgaatacccctttagcagtccaacaggggccttcagactgtgagatgcaggcacagcagagccacccagaagccaggctcttcaattaaggacagtggcattatcagcaaagcacccaagcatgcctctgtggacatctgtcctattgacgttcaatgaagtatgcagggtcctcccagaccactaactaatttctgtctcaggggtcacatttgagcagccagagtctcaagccacagagagaaagatggagcagtcctcagatcaggccagaggctgggccaccttaggggagcgggagcacccacaggtgaggttacctcacagacgccacatcgccggcgcttaaaggcgttctccttgtcttctctgtcatccttttcaatttgctctgcgaagaaagtatcgaagatctggtagaccagcttggtggtggtggctttcgtgggtcccctgtccttctccctggtagaatgcctgatggtctgccgcctcgcctgggctcgcctacgggagaggttccagcatctcagaggactgggacagaggatgtgggccatgctctaccctccccggtctccagtcttcactctggtccctgccgcatccttacctctgtcccagcgtgaccccagccagcttgatcaggtcccgcatgcagggtgtcaggaagatgggctgctcatcactgtccccggcctcgtcataactctccacctgctccaccacaaactgcgcgtgtcgcaggagggagtcctctgtgaagcggttcaagttgaggccagaaggaggaaccgtggtcttgaaagagaacaggtttctctcatgcttaagccaaactggcctaaatccaactgaagaacagtgtctgctggttctgaaggcaagtttccagtgggaatcccggatgctgaggaccctcgatctcttacctcgatcttgttgatcaggtcctcataggtcgagtcggaattgctctgcaggaactccaccacaatcttgctgatgtagatcttctcctgcatcagcccaaatatgggcgcatactcgggactgggatccatcagaatgtattcggcaaatgctggggtgaacagaggaggtgtggaaaaggggctggaatctgatggcgcctacagtggccacagggcatggaggagtctaccaaactcacccaacagtctaaaagtcatcccgtacccaaatgtcagaaacatagggcacaacacatcatagctggcttgttctgaagaagcctgtctgagccagccagagagcgaagactagctgagtaggccttcattgagctcatctctggtgtttggaattcagtctgggtttgggttgcaagaataagacctgctcttttttttttttcaggggaggacagagtcttgctccgtcacccaggctggagggcagtggcgtgatctcggctcactgcaacctctgtctgctgggttcacgtgattctcctgccatagcctcccaagtagctgggattacaggtatgcaccaccatgcgtggctaatttttgtatttttggtagagagggggtttcaccatgttggccaggctaggctggtctcgaattcctggcctcaaatgatccccccaactcggcctcccaaagtgctgggattacaggtgtgagccaccatatccggccaagacctgctcttacaactggagagtcagttccagagccagtcataactaacacaagaggctaccccaactgaacctgctaaggttcccagtcacatggccttctgcaagcctgctgagaattcccaccagagccccgtcagcccccaggaaggagaacatgaaggcccctttcagaccccggccagcctatgatgggccacacacttacaggtgctgaagccgatgagggccttttcacctccatcaaagccagtgatccaccattcatttatggggccaagatttttgccattaacaccacctagagcagaaaaaggaaatggactaaaggctctgactcacatcccaaacccaggaggcgctctaagcgcccactcagcagacatcccatcagccaggtcgggtgctcctcagtcatcacaatgacttggcctacagctgctcctggcacaaagtctcacaccctaactttaagaggcagcagcaactccagctgactattgcttcataagtatgttttttatttatacatatatataagtatatatgtatactatatatatatgctatatatttttttttaatagaggcaggctcttgctatgttgtccaggctcgtctcaaactcccgggctcaagtgatcctctggcctcagacccccaaagtgctaggattacagatgtgagccaccctgcctggctgtttttaaagtgtgccccaaacataatcccggactattccttaccttcaagagatgggtcatcatcatagattggttttgctgaaccagaaaagaagagttcgatattcttctcgatgaggccggtgtcgatgggacacaggtgaccgtgcttacagtacacactagacaggaaacaaagcacatgcttaccagctaagccgtgaaggcgggtcttcgtgcagacttcagatcaggcacgaggcaatgagagaatgtacaagtctgacactctttttttgtttgtttttgagacagagtcttgctctatccctcaggctggagcgcgatggcataatcttggctcactgcagcctccacctcccgggttcaagtaattctcctgcctcagcctcccgagtagctgggattacaggcctgaaccaccatgcccggctaattgttgtatttttagtagggacggggtttcactatgtgtagcaggctggtctcaaactctttatctccagtgatctacccacctcagcctcccaaagtgctgggattacaggctgaaccaccatgcctggccccgacactcattttttggttgcgggaacactggattaagacagcgttctatcacccagagtttctaccttattctcccacctaagcatcaagtgtatgtgtgtctgcaacagcaacaccaaaagatcagtcagacttacagtgcgggaaataccggtttctagaacaccttctactatgcagtgcagccactagctctattcagctgcagaacatttctgtcactcaaatgttaataaagcctcattcccatcaagtagcagtcactctccagtctcctcccaaccggccctcagcccccagcccccggcaaccaccaatctgctttctatacctatgaattcacctattcaagatacctcatatggttaattttatattatacgagttagacctcaatttagaaaataaagcaggttatagaacagtgtgaaaagggatgtgggaaggaaggacttctgcctccttttgggcataaatctcaaacacctgcggccccactgtccagatgccccttgacattcgggagcacgttctttagtgaagacagagaggcaagatgtcaaactcaaggaaaaagacatgaactgggtgttctgcttacaaacctgctcatctagacaaggaccaccctttcccggccaaagatgctgggctatcctcagagcccccatatgaagtctgcacaggtctctggagagcaccctccaccacactcacccagcttagtgccttggaagccagaaaggctcaaacaaaacactgcatacctcctgcggagctcccctactgcgtaccaggcatggcagacagaataggttgcagccctgcctcaggatgtaaggcccagaagaagagacagagagatgaagccagcgtggatcaagggagggcctacagaagagggggtcccgctccccgctgcacaggtgggctggaggctctctccataggggagacatgggagagaagctctaagccccaggcaggggcaggacccactggttggtaggccagaccccacccatgactggcttctatcgccagtttcaagccaagtacagcagtatggagagcccctaaataactcaggcagtccagctccagtggacagaaggcatgtgacttctggaaagtgtcctccaggccaccatccaccctccaggaacgaatctatgatagatctcaacttagggaggaagctgagacactcaggactctggcagccccagccccaggctcccccaagcctttgtccctggtgaaggccagagtgaggccctcgggcatggttgccagctctgcccaccacagcacacctcactcacaccagcaggcagaggtgtgtggccctgctttgggccaggcctcggggggctagcggttgctggtggacgcaacagcatcttgatctagatagaaggatcccatagaaggagagggaggggaacaaccatcagccaagcacggggaacgtgtgggtgccctcccagtgggtacaggaaccgctgcctgggggtgcttccaacaggggtccccaaggcacttccccctcctcttcacagagagggaaaataccacccaggcctaaaaggaggcagggccgttcctggagctgaggcatttcccacgaagaacaaggtgaagccctggagggtaactgcacccgcagggagagggagcaaaatggggctggggatgcctgagagcacagggcctctgcccactcaagagctgacgtgagcctcggtgaaggtacgggccggacgccaggcaccttccctcagaggacaggagagtcagtgctgaggcctgcaaggccctgtgtggcccagccccaacccagcaaccaccacaccagactcaccattcaccttccacagctggcacaggcccctccgagccctggtaatggtgtccccttctacctagggtgccccaccccggccatcccctcggcctcttctctcacaggccatcaaggtctttactgaaaatcattacctctcccgtcttcacagaacttcctcctcccacttattctctctgcatgtcaccaggcttttaaaatctgtcgtggctgtcactacccgacaggtatcacccatttctggctccgtgaaggcaggacctgagcagctacatccacgacacctagatcactggtacctagcacagagtaggccttcatctgagcgtgtgaccctcaggatgtgggcagaatggaggggtaatatgtgtagtgtaaaaacccaaaaaccaaaccaaaaatcagcaaagctctattgtcccttcatcagctttccacgtggctctttgagacggagtcttgctctgtcgcccaggctggaatgcagtggcaccacctcggctcactgcagcctccgcctccagagttcaagaaattctcctgcctaagcctctcgagtagttgggattacagtcgcgtaccaccacacctggctactttttgtattttcggtaggtttcgccatgttggccaggctggtctcgaactcctgacctgaagtgatctgctcacctcggcctcccaaagtgctaggattacaggcatgagccaccgcgcccagccctccacggtggctcttatccacgaagtgttagcttaagacatgttgcaggtcaggcactaaaaaacatcaccagaatcgtgagcccgcaggcacctctggggatgtgcctccttccacgaagcaaacatgcacacgaaagtgcacttacctgaagcaggtcagtttgtgctggggaagcgcctcataactctcaaagccagactcgttggcatcaaagatggacagcttctcatttgtcagcatctgtggctcatccacctgaaggacacggggctggtgagcagtgggacaagggacaggcagaggaaggctgggaagagagctgtacgtaccgcgtctggtgggtgctgcccatatttgaggtcagggtcgtccaggtactgcccgcactgaatgcacttgggagggtgggtctgtgggagcaggaacacagatgatggcactcagagagcagctcccagccgcctcgtgagcgccgccaccggctttattcccggcagatgtttaccttggagttcatgactgttttggcgcgagccatttttttctccgttctgggggaaaaaaaaaaatcacaagatcgtttgtttaattgtttcagaaaatatcaaaatcgcccctgtgaggtttctgcctgaggtgcctgtggcacagggaggcaccggctgtggcagtgaggcccaggcgcgtggtcacagtggctcttcaccgcaggggcatcctgcctgacgcaccttggtcctatgttcaccaacccgatccaaaatgagcctaaggttgctctggcaattactgaaaccccttcccttttgttctagaaccatcattttaacattaccatctgctttcgataatgtcaagaataaattcttacggttctttgggggtcgttttgcgtctcttctcctcctacacagggaaaacaaaagaggattaaaggctaagagagtgttttacacccagatagtgcttcggtgttaagaactttgtataagtgattatcataaaacagagagaaggggagggaggcagtgagagggccagcaggtgagctctgactcactctaccatctaaagtcatagaatacaaaatcttatagtcaggcccagcacagtggctcatgcctgtaatcccagcactttgggaggccaaggcacacagatgactggaggtcaggagttccagaccagcctggccaacatggcgaaatcacgtctctaccaaaaatacaaagattagccaggcgggcacttgtaatctcagatactcagaaggctgaggcagaagaattgcttgaacccgagacgtagaggttgcagtaagcagagatcatgccactgcattccagcctgggcgacagagtgagtgagactccatctcaaaataaatgaataaataaatctcataaccaaagacttcctgaaaagatttagaggaaaagccaattttttaaaaccttagctttcctgtgtaagtggacacctcaaggtaaacaaataattggccaggcacagggccgggcgcgatggctcacgcctgtaatcccagcactttgggagaccgaggcggatggatcacgagatcaagagattgagaccatcctcgccaagatggtgaaaccctgtctctactaaaaatacaaaaattagttgggcgcggtggcgcatgcctgtagtcccagctactcaggaggctgaggcaggagaatagcttgaaccagggagacagaggttgcagtgagccgatgtcgcaccactgtactccagcctggcggcagagcgagactctgtctcaaaaaacaaatacataagtaaataaataaataaataaataaataaataaataaataaataactggccaggcacagtggcccatgcctgtaattccagcacttgaagaagcccaggtgggaggactgcttgagcacaggagctcaagaccagcctgggcaacacagtaaaaccctgtctctacaaaaatagaaagttaactgggtgtagtgccatctgcctgtagtcccagctaccttgaaggcccaggtgggaggattgcttcagcccaggagtttgcggctatggtagctatgactgtaccactgcactccagcctcgacaagagtgagaccctgtctcaaaaataaatactaaaatgtaaaggtaagcaaacaattgatgagggggtatacagaccgagtcatgtcccctgcaaaattcatatgttaagactaacctgctatgtgactgtatttggatgtagagtctttaagagacaattatggttaaatgaggtaataaaggtggggccccatccaataagaccaatgtccttgtattttttgttgttggttttgagacagagtcttgctgtgtccccagcctggagtgcaatggtgtgatctcggctcactgcaacctctacctcctgggttcaagtgactctcctgcctcagcttcccaagcagctgggattacaggcccctatcaccacaactggctaatttttgtatttttagtagagacagggtttcaccatgttgtccaggctggtttcaaactcctgacctcaggtgatgcgcctgccttggcctcccaaagtgctgaaaagacaggcgtgagccgctgtgcccagcatttttttttttttttgagacagagtcttgctctgttgtccaggcaggagtacagtggcacgatctcagctcacagcaatctccgcctcctgggttcaagcaattctcatgcctcaggcttccaagcagctgggactacaggcatatgccaccacgcccagctaattttgctgtgtccccagcctggagtgcgatctcggctcactgcaacctccacctcccaggctcaagcgattctcctatctcagcctctcgagtagctgggactacgggcgtgcaccaccatgcccagataatttttgtatttttagtagagacagggtttcaccatattggtcaggctggtcttgaactcctgacctcatgtgattcacccgcttcagcctctcaaagtgctgggattacaggcgtgcgccaccacgcccagtcttctttttcctaagaccagcctgggcaacatggcgaaaccccgtcttggggaaaaaaaaaaaaaaaaaaaagaaagaaagaaaagtgagacctttaccttttcatcctcgtctttttcatcagaaatctgtggatttactttttcaggttctttttcttcgggcctccgtttggcagctctgcagggtgaacagatacacagcaagtagcagcttagaaacactaaccacatcgccaactcgcacggaaagtgacaaactaatgcctccccatgggaaagcaagatacccatgggagctctataggcacactgccagcttgtcatcccgagacgaggccttcagaggccccagggtccccacacatctacatcaccacaggtttctagaacaggcttttttttttttttttttttgagacagagtttcactcttgtccaggctggagtgcagtggcgcaatcttggctcactgcaacctccacctcctggcttctagcagttctgcctcagccttccgagtagctgggattataggcacccgccaccacacccagctaatttttgtatttttagtacagacagggttccaccatgttggccaggctaggctggtctcgaactcctgacctcaggtgattcacccacctcagcctcccaaagtgctgggattacaggtgcaagccaccacacctggcctagaacaggctttctactgatccagatgacacaaaagcacaagcattttaaacacttacagatctttgggttgacttctgtgcttcttctcatcctgacagaaaaataagggggaggtagagagataaagaagggaaaaaattagtttctgagccagagtgagataaaatgcaaacactgaagttacaggttagggatcccagcactgtggagctggaagacaggcaggcctgggcagatctaccgggtagacacgaggcttcactttccctcacttaattccccacctgaaactaacaagagggcactaaagaacctcctagaccagggcttggcaaactgtttttgtaagagccagaggatcagtattttcagctttgctgaccacgtggtctgtgtcaggatgatcatctctgctatggtagcacaaaagcacccacaggcaaaatgtaaatgagaaagtgtggctctgttccaataaaactttatttacaggctgtgtgcagtggcatgtgcctgtaaacccagcactttgggaagctaaggcaggaggattgcttgatgccaggagttcgaggccagcctgggcaacatgctgagaccccatctctgcaaaatatactatatatatatatgacacaggctggtcagctcggggggccctgcaccggggccaacagctcctaagggctgacacaagctcctccccaggttcagaggacaggctgcctctcctgtcttcactgcaggaagcccagagggcatttactactccaggactcaaggtcttcaggaacaccatcaataccccatctgaatgttggtcagagatgccagtggtttaatacaaaaagcagcatatatatatggttaatatatacatatatatggagagagagagagagattgattcactcttgttgcccaggctggagtgcaatggtatgatcttggctcacctctgcctctcaggttcaaacgattctcctgcctcggcctctctagtagctgggattacaggcattcgccaccacacccagctaattctgtatttttagtagagctggggtttcaccatgttggtcaggctgatttcaaactcctgacttcaggtgatccgcccacctcagtgtcccaaaatgctgggattataggcgtgagacaccgcgcctggcttacaaaaaataagtttaaaaagtagacatccatggtggtgcatgcctgtagtgccagctacttgggaggctgaggtgggaggatcacttgaacccaggagactgcagtgagctatgatagcaccactgcactcctgcactctagcctgggaaacagagcaagatcctgtctcaaaaacaaacaaacaaacaaacaaacaaacacgccgggcgtggtgcctcacacacataatcccagcaccttgggaggctgaggcaggtggattgtttgagatcaggagttagagaccagcctggccaacatggtgaatccctgtctctactaaaaatataaaaattagctaggcatagtagcacacgcctgtaatcccagctactcaggaggctgagacaggagaatcacttgaacctgggaggtggaggttgcagtgactcgagatcacaccattgcatgacagagagagactatcttaaaaaaaaaaaaaaaaaaaaaaaaaaaaaaaaaaaaaaaaaaaagaacaaaccaaacagactgaatgcaacggttcatgcctgtaatcctaccactccgccactttgggggactgagataggtggataactcgagtctaggagtttgactgagaccagcctgggcaacatggcaaaaccctatctctacaaaaaattaaaaaaaaaaattagctggacatggtggtgcctgcctatagtcccagctacttgggaggctgaggcgggaagatcacctgagcctgggaggtcgaggctacagtgaaccgtgattgcaccactgcattccagcctgggtgacaaagcaagaccctgtctcttgggatgggggacagtggctcttagagctttgggaggcagagatggcacctcctgtgcaaggggccccctggggtggaacagccaacaatccttgttctctgggcactgcttttattattattaccatattatttttttgagacagagtctcgctctgttgcccaggctggagtgcagcggcataatcttggctcactgcaacctctgcctcctgggttcaagtgattctcctacctcagcctcccaagtagctgggattagaggcacatgccaccatgcccggctaatttttatatttttaggtgacaccggatttcaccatgttggcctggctggtctcagactcctgacctcaagtgatccacccacctcagcctcccaaagtgctgggattacagtagtgagccaccatgcccagccctcacatccctttctaccatgaggcaaaagtgctggcagtgtgagctcaggcccctgccagtttccaatagagggcagggagtaatgtgactactccagtctgaaggagtgctgacagtaaggtgaccaacatttggacagaagaggtgagggatgggaggctggaggcaataccaaaggctcccctgctatggggtggggatggaagcccactggcgaccgggtcagaagtgagggtgcttgtcacccagcaagcccgtgaccttgggctccactctctagattgtaacaggcagaaacccagagaccctcttggggtcttcggcatctcttagatagggacccgccgccccccaccgatgacctagctcccttccctagagttcatgcaggagggcctgcaggcaacctggccatcctgtactttgacagaggcccagcagtgttccacatgatgctttagggtttaaacgcatgcacttggctaaactagactggggaggctggcagggggagagctagactcagaacgtaggaggctgggaaagaatcaaaggtgtggctgacatgtgcgtcagagctgactgtgtgtcaaggcttctcagcagtgaggcctcaggagaggatgcttcatgcacatctcagcccaggctcacacagaccctctctagtgtgaaagacagaggacaactgagtgttcactaggcatccagcacaggcatccagccacaaatcccggcccccaaaaggaggaaaaggtgaccttcccagagtctggatggccccatggagcctgggtggatggggctggacttgaacccagagccccaccctgcgcactcccgcccaagcaaacaggagcagaagaatgagggggagttcagaaacaaataacccgcctttactttctcgtctccatcttcgtcctcgtcagcctgcacgcctgccctggcttctctgtccggctcctccttcagtttctgtttgggtgttctgtcacagaagacaacacacacacaggctggtcagctcggggggggccctgcaccggggccaacagctcctaagggctgacacaagctcctccccaggttcagaggacaggctgcctctcctgtcttcactgcaggaagcccagagggcatttactactccaggactcaaggtcttcaggaacaccatcaataccccatctgaatgttggtcagagatgccagtggtttaatacaaaaagcagacaaagggatgtcatgatttccgtggcctgatgggaatccagcctgcggtggaggaagacccatgtctggcctgcctaggttgagagctgggctgatgtgcgatcagcgtcagtcagtgaccgtggacagctgactgcacacaggggtccgagtcttcacctcccactctgccagggccctgccgctcaggtggggtattctgcccacctctggattcaggctcagtctcaaaatttgcttcagctaattgttttctttttcttttttcctttttttttttcttgaggcagagtctcgctctatcacctaccctggagtgcagtgatgtgatctcagctcactgcaaccaccgcctcccgggttcaagtgattctcctgcctcagtctcccaagtagctgggaccacaggcatgcaccaccacacccagctaattttttgtatttttattagagacggggtttcaccatgttggccaggctgatcttgaactcctgacctcaagtgatccacccgcctcagcctctcaaagtgctgagattataggcgcgagctactgcacctggcccaacttttttcaacagaggtttgaaaaagtgctacttttcatttctgcccttgtggtctggcacagccacaagcgtgtacccagcctggccaaattgcggaggcagagctgggtcagcccagccatccccactaagccacctcaagatcagccgacagccaccaagctgtagacaagtgagcttgaaaaatgctcactgttctaggcctctggccttggagccatttgtcacacagcattttcacagtgaaaggtaagtgacacagctgctcacctgatggcctttcactaccacatgacacacagctgtgtgaccaaccctgagaagggccctggggttgggaggagaaatcgaagctaacttcaccccgtaatcccagcactttgggaggcgaggcaggtgggtcacggaggtcaggagttcaagaccagcctgaccaatatggtgaaaccctgtctctactaaaaatacgaaaattagttgggcatggtggtacaggcccatactcccagctactcgggaggctgagacaggagaattgcttgagcccgggaggtgggggttgcagtgagccaggattgcaccactgtactccagcctgggtgacacagcaagactccgtctcaaaattaaattaaattaaattaaagttaaaaaagttaacttcagccttcacttcagggtggtctcacctttcacaagcagaacttgcccacataagagacatatgattagtgcccactgttccacaccaacccgttattttaccaagatacttatgttagcaattcagtttcacaacaaagcacaaaggcaggttcgctgcacttacggttctttggtttgacttcggagtctcttttcttcctaagttgcagggaaaaaagacaagttaattttttccatttggtttggatctttctattaaagtgtcctatggaaataaaacacctgaactgattctagagtccactggtgggagtaaagactgtctaccagtgggcacagtagctcatgcctgtaatctcagaactttggaaggctgaggtgagaggatcacttgtgccaggtgttcaagacagcaattttcttttcttcttcagtggggtaagtagacaggaaatgaaactcttagaaaggagatactacaacactgcagtttcagtatttttacttcaaaattcctctactacttgtcatcagttaagtgttgatagcctcacagaaagtaactttattataaatctctacttccgatattaaaggaatgaaataggatggcccaatctgaaaagtagctccaactgagacacaacaacacatcctctgagactgcatttattcatttatttatttatgagacggagtctcactctgttacccaggctggagtgcagtggtgtactcttggctcactgtaacctccaactcccaggttcaaacaattctcctgcttcagcctcccaagtagctgagtttacaggcacacaccaccatgaccagctaatttttgtatttttagtagagacagggtttcatcacgttggccagactggtcttgaattcaagtgatccgtctgccttggtctcccaaagtgctggcattacaggcgtgagccaccatgcccagcctgaggctgcatttaaagaaccagacacatcttgccagagaatcaggcaagtcaaatccaaccctcagaaactccacatgtggtagtctgtgaagagatcgcaaaggtcaggaatattaagaaacactttgcagctgggcacagtggctcactactgtaatcccagcactttgggaggccgagatgggcagatcacgaggtcaggagatcgagaccatcctggctaacacagtgaaaccccgtctctactaaaaatacaaaaaaaaaaaaaaaaaaaaattagccgggcgtgttggcgggcgcctgcagtcccagctactggggaggtggaggcaggagaatggcgtgaacttgggaggcagagcttgcagtgaaccgagatcgtgccactgcactccagcctgggcgacaagagcgagattccgtctcaaaaaataaataagtaaataaataaataaccccgtctctactaaaaatacaaaaaaaaattagcctggcgtggtagcaggtgcctgtagtcccagttactcgggaggctgaggcaggagaatggcgtgaacctgggaagcggagcttgaagtgagcggagatcgcaccactgcactccagcctgggcgacagagtgagactccgtctcaaataaaaataaaaaaaacgcttagcaaatcttcctactacaagaagaaatcctgagagtatgcttacaggtgagggatttcgatcttgccccaggttccttctttggaaggtggtggttgaactagcccgttaggactgcttgttctgaaacaaattcgaggtatgcactgactgcaactgctgtctaatttaactaggatcagggtaggaaaggtgatcaatgaaagaccagcctcggccgggcgtggtgtttcacccctgtaatcctggactttgggaggctgaggtgggtggatcacctgaggtcaggagttccagaccaacctggccaacacggcaaaaccctgtctctactaaaaatacaaaaattaggcggacggggtggcgggcgcctataatcccagctactggagaggctgaggcaggagaatcgctggaacccagggggtggaggttgtagtgagctaaaattgcgccacttcactccagcctgagcgaaagagcaaaattccatctcaattaaaaaaaaagaaaaaaagcaagaaagaccaacctcaagtactgaatggttcaaaaattattgtacagcggccggatgcagtggctcacgcctgtaatcccagcactttgggaggccgaggcgggtggatcacctggggtcaggagttcgagaccagcctagccaacatggtgaacccctgtctctactaaaagtacaaaaagttaattagctgggcgtggtagcggaagcctgtaatcccagctactcgggaggctaaggcaggagaatttgtttgaacgcaggagacagaggttgcagtgagccgagatcacaccactgcactgcagcctgggcaagtagaacaaaactccgtctcaaaaaacaaaaaaaattactgtacattttagttgattccccaatggacagccatcctttactaagctcccaagtaaggcactcgtcacctacctaagttggtaagaaacttctagtcatcttggtttttttttgtttgtttgttttgtttgtttgtttgtttgttttaagaccagtctcactttatcatccaggctggattgcagtgggacaatcatggctcactgtatcctcagcctcctgagctcaagtgatcttcctgcctcagcctcctgagaagctggaactacaggcacactgcctgttgtaagctccaccacatccagctgatttttgtattttttgcagagacggggtctcactacattgcccaggctggccctgaactcctgagctcaagcgatccacccacctcggcctcccaaaatgctagaattacaggcatgagccaccacacccggccctcagtcatcttattaaaaaacaaaacaaacagaaaaaaaaacaggacccagcatctgtattgcatagaaccttagactcagattttacaaagaagatgagggactggggaaagagctggtctgacttcagagaggagaatacaactttatgtctggatgatgctaaagaattttagcacctcctacatctgaaaattagatcttcaccaagatctcgtcagccagagaaggtggctgaggtgacagactgaaactgactagttgatttaagtagcataggttggccggtgtggtggctcgtgcctgtaatcccagcactttgatggctgaggcaggtggaccgttcgaggtcagcagtttgagaccagcctggccaacatggtgaaaccccgtctctactaaaaacacaaaaattggctaggcgcggtggttcacgcctgtaatcccagcactttgggaggccgagatgggaggatcacgaggtcaggagatcaagaccatcctggctaacgtggtgaaaccccttctctactaaaaatacaaaaaattagccgggcatggtggcaggcgcctgtggtcccagctactcgggaggctgaggcaggagaatggtgtgaacccaggaggtggagcttgcagtgagcggagatcaagccactgcacttcagcctgggcgacagagcgagactccgtctcaaataaataaataaataaataaataaataaataaataaataaaaacacaaaaattagccaggtgtggtggcaggcgcctgtagccccagctagttgggaggctgggacatgagaattacttgaacctgggaggcggaggttgcaatgagccaagatcgcacctctgcactccagcctgggtgatagagcgggagactgtctcaaaaaaaaaaaattaaattaaattaaataaataccacaaataagtagcaaagatcctcgctatgacaacctcataacccaccttccatgtagagaactacaaaaaaataagtttgaaaagtattttaggccgggtgtggtggctcacgcctataatcccagcactttgggaggccaaggcaggtggatcacctgagattgggagttcaagaccagcctgatcaacatggagaaaccccatctttactaaaaatacaaaattatctggctgtggtggcaggcacctgtaatcccagctactcaggaggctgaggcacaagaacccgggaggcagaggttgcggtgagacaagatcacaccactgcattccagcctgggcaacagagcaagactccatctcaaaaaaaaaaaaaaaaaaagttttagcacctcgtacgtctgaaaattagatcttcacaaagatctcatcagccagagaagcaagaaggcgaggtgacaaactgaagctctgtgactagttgattaagtggcataggttggccggtgtggtggctcatgcctgtaatcctagcactttggtggctgaggcaggtggatcactcgaggtcaggagttcaagatcagcctggccaacacagtgaaaccccatctccactaaaattagccgagtatggcggcgggcgcctgtagtcccagtgactcaagaggctgggacatgagaatcacttgaacctgggaggcagaggttgcaacgagccgagatcgcacctctgtactcattccagcctgggtgacagagtgggagactgtctcaaaaataaataaataaataaaataaaataaaatatcacaaataagtagcaagggtcctcactatcacaatctcataacccacctttcatgtagagaccacgagaaaacaagtttgaaaggtgtttagccaaagtcaaaggcatttcgatcactagcaaaacccatcttgttcttccacgttccccaccccctgtccccacgtcctggaaggaaattgggaccatataggattaagggagaattaacaaacttagaggtgatagagctttactttttcatctctttcttcttccttttcagtgcgcgttcctgattttgctctttcaggttcttctgcaggaagcggtctagcaactctgtcaagcaaaataacacagaccccaagtgtgagtgccaggagcttccccaaagaagcagttttcataaagctcctctttcccccaaaagcaatcttcattatctcaggagccctgacagacacatactcatttaacatttagtatttgatatgacttttacacctggttcgaatgccagctgccctcgattcattccttccaagaaaacaggagaattctacttgaatctaaacgctaatgatctgaccccaaattcagatacttcataacgatatggttgccatggaaacacacgataaagttcttctttttaaacttttttttttttttttgagatggagtcttgctctgtcactcaggctggagtgcagtggaatgatctcagatcactgcagcctctacctcctgggttcaagcaatccttctgactcagcctcctgagtagctgggattaaaggcacattccaccacgcccagctaagttttgaatttttagtagagacggggtttcgccatgttggtcaggctggtcttgaactcctgacctcaagtgattcgcccatcttggcctcccaaagtgctgagattacaggcatgagtcaccgtgcccggccttaaactttctgaaaaagttttgtgatcaagattacacaactcgtagaacaaaaagaaaggtatagtaactattcttaccgttctctggatgtaactctacgtctcttctcatcctgtgtggagggaaggaagaacaaaaaagattagaatactggtttcaagggaaggtcaacaccaaaagtgtgagttgaaatattaacacatttgacatggttagagcaagagtgggaaaagaaggggcctgggttttggggagaagatctgagaaactcttactctggtattaatccccaccaaccccaaaacaaaagcaggtccgagaagtaggcaggcacactgcccatcactagagatcgcctggtgatactatgtaaaagaatcaaagattctccatcttgtgtcaggaatttgtttaatttatttgttagagaccagtctgggcaacatgggaaacctcatctctacaaaaaatacaaaacttagctcattggcatgcgcctgtagtcccagctgcttgggagggtgaggtgggaggatcgcttaagcccaggaggttgaggctgcagtgagccatgactgcgccactgcaccccagcctggtgacagaatgagacctgtctcaaagaaaagaaaagaaaagaaaaaagacagaactgtaatcccaacactttgggaggctgaagcgggtggatcacttgaggtcaggagttcaagaccagcctggccaacacagtgaaatcccatctctactaaaaatataaaaattagctgggtatgatggcacatgccttgtagtctcagctactcaggaagctgaggatggagagtcacttgaacccaggaggcggaggttgcagtgagctgagatcgtgccactgcactccatcctgagtgaaagagtgagactccatctaaaaaaaattaaaaacaacaacaacaacaacaaaaaaaacaaattggctgggcacggtggctcacacctataatcctggcactttgggaggctgaggcgggcagattgcctaagctcaaggagttcgagaccagcctgggcaacatgggagaccagcctgggcaacatggtgaaaccccatccctactaaaatacaaaaattagccgggcgtggtggcacgcgcctgtagtcccagctactcgggaggctgaagcaggagaatcacttgaacccgggaggctgaggttgcaatgaaccaagattgtgccacaagagcaaaaccctgtctcaaaaaaaaaaaaaagtctcaaaaaaagaagtctaaatacatacatacatacacacacacacacacacacacacacacacacacacacacacacatatatataacatgtatgtatgtaagactgccttgccacttgagctatgacatcatttctcccctggacctccagcctgccctgcagatttcaaatttgctggctttcacaatcttgtgagccaatttctcaaaataaagtctctccccataaatatatattccaactatgtacccataaaaacaagaaaaaaatcaaacgaattatatatatatacatacacgtgcatatgtatatatgtacctatagctgtatacacacatatacattctattggtcctgtctctctggagagccctaaatagagccctagacagggtttttatttacttggacagaacacatatgaagtcacaatcatcaaatacaccaagttaaggtagagtcaggaaatgaaagcactggccctacctggtctttgtcttcttccttgatggactcatccgatttggctctttcagactcttcctgaggtttccgtttggcagggctgtcacacacagtgaggccaaccattagtggaacaagaccctaggcctccagctggcctgaagtggaccctcattcaccaggatgttgaaagaggcttcaagtttaatgtttctctgaatgacgggtttagaatgttgtcttgccatcttgtaagtcctaagaaatcacgggtctaaacaccgatcaacagctgctagtgtcagagaagagacctcacacacctttctgatggagggacacagcaccatccataaagtcagcctcagaccaggtgcagtggctcacgcctataatcccagcactttgggagtccaaggcatgaggatcacctgagttcaggagtttcagaccagcctggccaacgtggtaaaaccctgtctctaccaaaaatacaaacattagccaggggttgtggcgggcacttgtaatcccagctactcaggaggctgaggcaggagaatcgcttgaacctgggaggtggaggttgcagtgagccgaaatcatgccactgcactccagcctgggctacagagcaagactccgtatcaaaaaaaaaaaaaagtcagtctcaaaaaataaaaagctggaatctgatcagtcctgtaatcctatcagtttatagggaacagaaggcaaggggacctgtggaacaccacaaggatgcaatcggcccaatctaggaactattggacaaatgaatttcttcaagtaaatggcaagaagataagagatgaaggaatttaaaatctgtgaggaattttaagtaaaataggagggaaggaatctataactttaaggaacaagtcaaccaaacgctgtctgtttgccacacggcttgttcaccacaaagggaaaaacgtaaataccaactatatatctgatagcagggaattcttacatttttataaagacatcagaacagtattatactttggtttgttaaaaagactgttttggctgggcacggtggctcacgcctgtaaccccagcactttgggaggttgaagtgggcagatcacctgaggtcaggagtttgagaccagtctggccaacatagtgaaaccccacctctactaaaaatacaaaaattagccaggcgtggcggcgcgcgcctgtaatcccagatactcaggaggctgaggcaggagaatcacttgaacccgggaggcagaggttgcagtgagccgagatcgtgccactgcactccagcctgggtgacagccagatgctgtctcaaaaaaaaaagactgctaaatgttagcaattattgtaaaatatgagtaattttttaaaaagttgtcaaaagagatctcattgtctagaaatatactaaactatatatggacaaagtaatccaggtggggcagggacacacaatatgggggtatagatgaaacaacggctgtaacttgataactgttggcactagatgatgggtatttcagggttcattatacaaaactcatgattttgtgtacatttgaactttcctatatgagtaaaaacaggtaacgttttcagaaatgctattcataaatgtctagagaacagaaccgcaagatgaaaacctatacaacacggaagacagaattgccacgtgacgccctaccaattccatcccaaaacagccggcccctaaaaaaggcagccgccaatttatcgtatactgacccctttgcaaaatgagatgtgatggtggtttgcctggtgcttttccttgtaatcctggggctaggtgaaggttcagctgtttaaagaagaaaaagcattaaaaagaaaaaaaaaagccactatcaatagaaagcccacagcaataatgcagttcaacattactaagctattgcaggaagccaggttctaaggactaagcatctttgcatttttattctagtcaacaaccagcttgctaatgttggcagttagcacctgccagtttgttgagccatatcatgtcagttatttgaggggccaaatgctaaagaaggccaggaaacagagcctcttgttaaaatatcaaaagatgaagtgggccaggcacagtggctcacatctataataccaaaactttgagaggctgaggtgggaaaataatccaagctcaggtattcgagaacagcctggacaacatggcaaacccccatctctactaaaaatacaaaaaaattagctgggcgtggtggtacacacctataatcccagctattcaagaggctgaggcacaagaatcacttgaacccaggagatgggggttgccgtgagccaagatcgcgccactgtacacagccttggcgacagagcaagaccctgtctcttaaaaaaaaaaaaaaaagaaaagaaagaaagaaaaaaaagaaataggccaggtgcagtggctcatgcctgtaatcccagcactttgggaggcaagacgggcagatcacaaggtcaagagatcgagaccatcctggccaacatggtgaaaccccgtctctattaaaaatacaaaaattagctgggcgtggtggcacgtgcctgtagtcccagctcctcaggaggctgaggcaaaaaaatcacttgaacccaggaggtggaggttgtggtgagccgagattgtgccactgcactccagcctggcaacagagtaagactccatctcaaaaaaaaataaaataaagggccaggtgaggtggcttacacctgtaatctcagcactttgggaggccaaggcaggtggatcacctgaggtcaggagttcgagaccaccttggccaacatggtgaaaccctgtctctactaaaaatacaaaaattaactgggcgtggtggcgcatgcctccatctcaaaaaataaaataaaaattaaaagaaaataaaataaggctgggcatggtggctcacgcctgtaatcccaacactttgggaggccgaggcaggtggatcacgaggtcgggatattgagaccatcctggctaacacagtgaaaccccatcctactaaaaatacaaaaaattatccaggcgtggtgtgcgcctgtagtcccagctacttgggaggctgaggcaggagaatggcatgaacctgggaggtggagcttgcagtgagccgagatcgtgccactgggcaacagagcgagattctctctcaaaaataataataaaataaaacaaaataaaaatgaagtagctgagaaccagacctgagctcaagtactatcctattgtttgttttttaaaaaattccagaagaggctgggcgcggtggctcacgcctgtaatcccagcactttgggaggccgaggcgggcggatcatgaggtcaggagatcgaaatcatcctggctaatatggtgaaatcccgtctctactaaaaaatacaaaaaaaattagccgggcatggtggcgggcgcctgtagtcccagctactcgggaggctgaggcaaaagaatggcatgaacctgggaggcagagcttgcagtgagccgagattgcgccactgcacttcagcctgggagacaacaagactccatctcaaaaaaaaaaaaaaaaaaaaaaaatttccattagagttcctttgcctaaaactgggcaagagtctgagaataaatgtttaaccaggcatataaggtcttagaaggagtaagtatttgtagcacttgtcatctgcaacctgtcacactcatagccatgttttgggatctaatgctgcaacttggtcgaaaacaacatttttttttttttgagacagtgtcttactcttgttgcccaggctggaattacagacacccgccaccacgtctggcaaattttttgtattttcagtagagacagggttttgccatgttgggcagggtggtctcgaactcctgacctcaggtgatccagccaccttggccacccaaagtgcagggattacaggcatgagccaccacacccccagctaagacaaaatttaaagacgtacacatctaagctagttaggaagtgtccagtaattactagtgaggatgcgtacaaaagaaaggaacctggacacactgacctggggtccaagtttaactgcccccttatatgctaccaaagcctgcttctaggttgaaaatgagccaagtggggccgggcacggtggctcacacctgtaatcccagcactttgggaagctaaggcgggaggaccacttgaggtcaggagttccagaccagtctggccaacatggtgaaaccccatctctactaaaaatacaaagattagctgggcatggtggtgcccgcctgtaatactagctacttgggaggctgaggcaggagaatcgcttgaaactgggaggcggaggttgcagtgagccgagatcgcgccattgcactctatcctgggcgatagagcaagactctgtcattaaaaaaaaaaaaaaaagaaagaaagaaagagagttaagcagggccaggcgtggtggcttatgcctgtaatcccagcactttgggaggccaaggcaggtggattacttgaggtcaggagttctggaccagcctggccaacatggtaagaccccatctctactaaatacaaaaattagctgggtgtggtggcacatacctctaatcccagttacttgggaggctgaggcaggagggtctcttgaacctgggaggcagaggttacagtgagccgaggttacaccactgtgctccagactgggcaacacagtgagactccatctcaaaaacaattaaaaataaaaggaatcatctgctcttacgcttagcctctccatcggacttgctcctcctgggcgtgcgaggtttggaaaggggtttgggggggctgttggcatctgccattcccactctacgggcttcacttcttgcttggttcccgttttctagacgtccattcacttcccggttgtaagcatgagcaccgttctccaaggacaaatctttatttaaaagggatttgactttagccaggtagccctcctacagcaggaaaggataatttaagtagcagtgaatgtaaacaagtgtcagagaacaaggaaacacatgtgtttccttcatcatcatcatcatcatcatcatcatcaggcaatgaggacagctggggatcttgctgcctccctggtcacagacaagttactaggaggagacatttttctagaggctaggatgctgagaactgacttacctcggataattcttctttacgtaatttggtttccaagtcacataactgattctttatttctgtttgcagaaattcgtgcaagagattcaatttctccttcacacattcctaagggaaggatataggtttagcagtacccacattcccaagctattcactagtggactaatacacaaattattgagctgcctgatcacatcacaatgagtgaatggcaggcaatgctgtctcagtcaaaacactaaacagtcatgaaatgtgttcagggaatttccattaggatcacttcactcctgtctccaaagtggtgaaaaatgggaaagctggaggtgagatggagacatatcatggtttataagaataatactgtgcttctgtaaagtgtcggccaggcacagtggctcacacctataatcccagcactttgggaggccgaggcaagtggattgctttgagccccagagttcaagaccagcctggggcaacatgacaaaatcccatctttacaaaaaatatttaaaaattagctgggcatggtggcttgagcctgtagttagagctactcaggaggctgagtgggaaaatcacttgagcctgggaggcgaaggttgcagtgagccaaaattgtgccactgcactccagcctgggctacagaatgagaccctatctcaaaacaataacaaaaacacaataaaacagtgttaccaggacaagttacaatccagagtagattgtttaggaactgagattggttaaaaaaaaaaaaaacctgggccaggcatggtggctcacgcctgtaattccagcactttgggaggccaaggtgggcagatcacgagcaggcgttcaagaccagtctggccaacatggtgaaaccccatctctactaataatataaaaattagctgggcatggtggtgcgtgcctgtagtcccagctacttgggaggctgaggcaggagaacagcttgaatccgggaggcagaggtcacagtgagccgagatcatgccattgcactctagcctgggtgacagagtgagactctgtctcaaaaaacaaaaacaacaacaaaaaaaaacaccaccaccacccaactattagcagcaaattagtgctgacatttaacaagaatatccaaattatctttgaaactccatgggaaaaaatgcaaaatccatttaaagaaaacaaatttctttttatgagccacaaagtgtgtcagtcagatttggtaataagaaaaattttaaggtggagattaccttttctgttaagctgtctctttccaaatctttgagcctgggaggaagaaataggggagaaaatacaaacacttgttaagcaacttcatttgcctgtaagaatatcacagttctaaagaagttttggacacaaacaagtttaacatatgagtgttagaaaaaactaagctggcttttgtctccccgcaagagtctagagtgtcctactggaatgcctaatgctaagaagtcatctgatctgaacaaggttccccttttgggggtcatttttctgatgattgtgagattacatagcagctctgtaacacaattatgtgtatgtgtgtgtgtgtgtatatatatacatatatatgtgtatatatatacatatatatgtgtatatatatgtgtgtatatatatacatatatatgtgtatatatatgtgtgtatatatatacatatatatgtgtatatatatgtgtgtatatatatacatatatatgtgtatatgtgtatatatacatatgtgtatatatatatacacacacacacagcagctctgtaacagagtatgtgtgtatatatgtatgtatatatgtgtatatatatacacacacatatatacatacatacatatacattatacagatagatagacagacagacagacatggagtctcgctctgttgcccaggctggagtgcagtggtgcgatctcagctcactgcaaccctcaccttctgggttcaagtgattctctcacctcagcctcccaagtagctgggattataggtgccaccagcctcgttaattttttgtattttgagtagagacagggtttcaccatgttggttaagctggtcttagattcctgacctcaagtgatccgcctgcctcagtctcctgaagtgctaggattacaggcatgagtcaccatgtctggcatgcatatatatatacacgtatatatatacacgtatatgtgtgtatatatacatatatatgtgtatatatacgtatatatgtgtatacatacgtatatatgtatacatatgtgtgtgtatatatatatacacgtatatatacgtgtgtatatatatatatattttttttttttgagatagggttttgctcttgttgcccaggctggagtgcaatggtgtgatctcagctcaacctccgactcccaggttcaagcgattctcctggctcagcctcccgagtagctgggattacaggcatgcaccaccacacccagctaattttatatttttagcagagacagggtttctccgtgttggtcaggctggtttcgaactcccgacctcaggcgatccacctgcctcagcctcccaaagtgctgggattacaggcatgagccatcatgcccagcctgtatattttaaaaggtaccagagaccaggcatggtggctcacgcttataatcccagcactttgggaggccaaggcgagcggatcacttgagcccaggcgttcagaccagcctgggaaacatggcgaaactccatctctacaaaaatacaaaaattagtggctgggcgtggtggctgatgcctggaatcccaacatacagcagcagttgggtggattacctgagggccaaggtgggtggattacctgaggtcaagggtttgagaccagcctggccaacatggcgaaaccccatctctactaaaaatacaaaaattagccaggcgtggtggtgggtggctgtaatcccagcaacttgggaggctgaggcaggagaatcacttgaacccgggaggcagaggttgcagtgagctggtcacaccattgcactctagcctgggcaacaagagtgaaactctgtctcaaaataaaataaaataaaataaaataaaaataactgggtttggtggcatgtgcttgtggtcccagttacttgggaggctgaggaaggaagatcacctgagcctgggaggtcgaggccacagtgagccgtgattgcatcactgcactccaatctaggagacagagtgagaccctgactcaaaaagataccaggaaagagggggcaggtcatatagttggggcactcccgtaagggaaatgacctacagctggtctttctccagttgggtctgacaacagcccataacaaggtgtgccacagtatggccagtgtcagaatgagtagcccagggccacaggacactgtggggaacagccagctgatgttcctaaaggcctggtggggggtggtggcattttgaggatgaaatgggggagtcaagcatccagggaagcaaggggtacccacacagagggcagatagaggtgaagttagaggaggtggctggcgcctccccgaataactcattcttcaggatgtctctagctagtcattcctaaatgtagaactgccaggagtttgcctgggaaatcgtggtctgatttgattactgacaattagtagcttgactctttcagggacaaagagggaaaaaaataaaagaacaatagccggtgcagtgccgcggtgctgcgtgcctgtaaccccagctactcaggaggctgtggtgggaggatggcttgtgggcaggagttcgagtccagcctggacaacatagggcgatcctatctcttcagaaaaaaataaaggaacaagaagagaaggtaccaaggaaagggagaggaacacaggctgttgttcccagcctgggtgctaactacagactgcggggtgagaacaggcctaaccagctgggtaagtgtctgttggtggagagaaggtgccccaggcagggaccaggccactgccatctctggacctttccacctagcacccgcacagacaggtgctcagttatcatttgcctgaagggcagaagtggctcctccaggctggccttcctagagggtaagtgcaggcagcagcatgaggaatgctttgctggacccatgtcttacaacagctgctctgggtcatgcgggccctgattccccaccagcgccgctcacatatgagcacctgctgaatgccaggccctgctccaggcaaagagctaagtgattagatgtaggtgtcactaggcagggacttcctgacttgctgtgtggttaggaaagaccattctgtagggccgggcacggtggctcacgcctgtaatcccagcactttggaaggctgaggtgggcggatcatgaggtcaggagatggagaccatcctggctaacacagtgaaaccccgcctctactaaaaatacaaaaaattagccaggcgtggtggtgggcgcctgtagtcccagctactcaggaggctgaggcagaagaatggcgtgaacccgggaggtgaagcttgcagtgagccaagatcatgccactgcactccagcctgggcaacagagcaaaactctgtctcaaaaaaaaaaaaaaaagactgctctgtagaagagacacttagcaccctacaaacacagtggtaatatagactgtatattatatatactgtatcacttggactcaaggtgctacaaggccaggcaagacgcagtggctcatgcctgtaatcccagcaccttgggaggccaaggcaggaggatcacttgaggtcaggagtttgagaccagcctgggctacactgagagatcccatctctacaaaaaaaatgtaaaaattagctgggtgtggttagtgtgcacctgtggtaccagctacttgggaggctgaggtgggaggatcgcttgagcctgggaggttgaggctgcagtgagttatgatggtaccactgcaatccagcctgttcagcctgggcaacagaacaagaccctgtctcaaaagaaaaaaaaaaaaaaaaaaagatgctttgacatcaggatttccaggagcacaaggaacctcttccaggcaaaagtcattctacccttgtagcaactggggtccaaggagagccttaagtcaggagggctacagaaactggtacttccagccagaggcacacacgctgtggtaatagcgttacacttgacttctcagtcacgccgctgagaaaactggaaggacatggcttctacctcgaccaagccagccagtcccctgatcccgaggttgcctggggtgtgaaggacaaggttcaactgattgcggagaccaaggtgtccttgcagaatgggtctgctttctttcaacccctcatatgaactgggatatttagcctggcaaagagaatagagaaaccttcaaaacccctagaatgtttcatccagtagaaactggatttaacctgcctggccccagagtggcaggtgggatcccaggcaggcagtgaggagctggcgggagggtaactttagcgacatcccttccctggtaaaactgtgatgacaccgatcacacctgctgaagccaggagggtcgcagacagccgtgaaggacggagcagaggactcagaatgccggcttagtgcccagcctgagaccctatgattccttcctagtgcttccctcagagatgaaccctctgcagaggggagataagatatatataaacagctggccaggcacggtggctcatgcctgtaatcccagcactttgggaggccgaggcgggcggatcacctgaggtcaggagttcgagaccagcctgaccaacatgaagaaacttcgtctttactaaaaatccagaatcagccaggcatggtggcacatgcctataatcccagctactcaggaggctgaggcaggagaatcgcttgaacccgggaggtggaggctgcggtgagccaaggtcacgtcattgcactccagcctggacaacaagagtgaaactccgtctcaaaaaaaaaaaaaaaaaaaaagatatatataaacaaccacagaggaataaggcaaatacagctcacgcctgcgggattcccaagagaaagggtataacagcctcaggaagaagttgacagctctgtgtgaaccgggcacaggaagctgctcaaacaggggcaccattgagaagtggctggttctggaaacacacaagaaacaaacgtgagactggccacatacagggagggaaaggcacctccagagaggtggctggggacagtcggagggagggcaaaagcatcacacttatccatcttgttccatagttaacaaacaccaaagcagtcaaggggaagtagaaccaatgacatcagagccgtgttaagaaaactaacccagcagaggtatctagtatagattggataggaagaaattataaaatgttagattactctaacacctctacgccagaaatgctcgtctgaaatacagcagaccatggctgggcgcagtggctcatgcctgtaatctctacactcgggaagccaggacaggaagatcacttgagcccaggaattcgagactagcctgggcaacagagcgagaccctgtctctacaagaaagaataattagctggctgtggtagcatgcacctatagtcttagctactcgggaggcagaggcgggaggatcactagagctcaggaatttgtgaccagcctgggcaatacagtgagaccctgtctctacgagaaaacagtaattagctgggtatgacagcacgcacctgtactcctagctgctcaggaggccgaggcggaaggatcactagagcccaggaatttgagaccagcctgggcaacacagcgagaacctgtctctacaaaaaatagtaattagctgggtgtggtggcatgcacctatagtcttagctactcaggaggctgaggcgggaggatcactagagcccaggaattcaagaccagcctgagcaacacagcgagaccctgtctctacaaaaaatagtaattagtaattagctgggtgtgctagcatgtgcctataggcctagctactcgggaagccaaagcgggaggatcaatagagctcaggaattcaagaccagcctgggcaacacagcagagaccctgcctaaacaaaaaatagtaattagcttggtgtggcagcatgcacctgtggtcctagctactcaggagactgaggcaggaggatcactagagcccagtgagctataattgtgccgctgcattccagcctgggtgacacagcaagaccttgtctctaaaaataaaatatagtggaccatgcaagacaagttacaagtctctgtcaaaccagcttcttcaggccggctgcatggcagctggagcagggctgcccaagaaggcatccgcagtaggcaaaagagtagacccactgggcacagtggctcatgcctgtaatcccagcactttgggaggctgaagcgggtagatcacctgagctcaggagttcaagaccagcctgggaaacatggcaaaaccccatctctactaaaaatacaaaaattaaccgggcttggtggctcacgcctgtaatcccagctactcaagaggctgaggcacaagaatcatttgaacccaggaagcagaagttgcagtgagccgagatcatgccactgcactccagcctgggtgacagagcgagactccatctcaaaaagagtggacccaccgaaaaatgttcatgccctaatccctggaacctgtgaatatattactttacgtggccaaagcgattttgcagatgtaactaagaatacagaccttgagatggggagattatcctggattatctggggtgggcccaatctaatcacttcagcccttaagaacacagaacctttctagctgcagagagcgggcaacgttggaggacgggtcagagagagatgcaacccgcaaatgctgactttaaaggtagaggaagggggcatgagccgagggatgagaccgcctccagaagcgggcaacgaccctcagtttagaaccagtgaagaaaatgggacctgagtcttacaactaccaccttctgccaacaccccaaaataggaaacagattctcccctggagcccccagaaaggaatgcagcctgcttacaccttgattttcatccggtgaaacccacatcagatttctgacctgcataaggtaataaatgtatgtcctttaagccggcaagtttgaggcaagaccctccacctgcaaaaagattatgaatcgctgaagactcagatgattttttttttttttttgagacggagtctcgctctgttgcccaggctggagttcagtggcatgatctcggctcactgcaacctccgcctcccaagttcaagcaattttcctgcctcagcctcccatggagctgggactataggcgtgtgccaccatgcctggctaattttttttgtatttttagtagagacggggtttcaccgtgttagccaggatggtctcgatctcctgacctcgtgatctgcccaccttggcctcccaaagtgctgggattacaggcgtgagccaccacgcccagctgatttttttttttttttgagacagagtctcactccttcacccaggctggagtgcagtggcacaatcatggcaaactgcagcctcgacctcatgggttcaagtgatcctcccacctctgcctcccgagtagctgggaccccaggtgcatgccaccacttttggctttatttttttttttgagatggggggggtcttcctatgttgcccagactagtcttgaactccttggctcaagcgatcctcctgccttggcctcccaaactgctgggattacaggcatgagccactgcacacggcctagtctaataacttttacacatactaggaaaccaaaatgtgtgtgtgactcactttcttgctagattcactttactgcagtggtctggaaccaaacccacagcatccccactgtacacacagtaccacgtaataaccagtgatgaagggctttggacaggtgctgctctcaacatatctgtactgataagctcagtcttcctaacacccctgtcgagcaggcagccccaccccctttttatagatgaaacaccaaggcaccaagaagttcaataacttagccatacggctggcaagtagggcggcatttgaaacccagcagtctgtacccctagaattctaccacaggggagcaaaacaaaagaggtaagtcaattttgccttattcagtatgtactcagtagtagccaaggaactggagttaaggagttcaagacctagcttaatcccatcacagaatgactagcagtaagaaagctgtggtagttacgaaagctaatcagttgtgcaaaggagtctgctagcatcagtgttaatccaggctgtacaggggaagagctggcatgcaagcatttgagtctactgtgctccaagctgcagatacagtgaatacggcagacacgctctggtaacagaccctgaaataatcactaatttcagtgttataatggcaccatgcgggatacaccgacaaaattcaacactctttattgtggagaagcaagcctagctgtctgagagcaggcttaagaatgaattaaaaggccaggcacggtggctcatgcctgtaatcccaacactttgcggggctgaggcaggcgaatcacttgagtccaggagttcaacaccagcctggccaacacggtaaaccccggtttctactaaaaataagaaaaagttagccgggcgtggtggcacatgcctgtaatcccagctactcaggaggctaaggcaggagaatcacttgaacccgggagggggaggttgcagtgagccaagttcgcaccactgcactccagcctgggcgacagcacaagactctgtctcaaaaataaaataaaataaaataaaataaaataaaataaaataaaataaaataaaataaaaacaatgaaccggctggacaccatcatacctgtaatcccagcattttgggaggctaagataagtggatcacttgagatcaagagtttgaaaccagcctggtcaacatggcaaaacccagtctctaataaaaatacaaaaattacctgggcttggtggcgggcgcctgtaatcccagctacttgggacactgaagtaggagaattgcttgaactcgggaggtggaggttgcagtgagccgagatcacggccactgcactccagcctgggcgacagagcaaggctcagcctcgagggggaaaaagaaaaattagctgggcgtggtggtgcacacctgtaatcccagctacttgggaagctgagacaggagaattgcttaaacccgggaagcggaggctgcagtgagctgagatcacaccattgcactctagcctgggccacagagcaagaccctgcctcaattaaaaaaaaaaaaaaatctaagtttcaagtactgttggataccatgtttatttttcatttaatgaaatattttcaaaatgtaaaaaaaaaaaaaaaagtctgtggagtgagtcatataaactacaatttcaatgtctaccacatggtcaaaagcagtcctccaaaactccaatgcctacagtgaagcaatctgagtgtaaagaaatgtggaacccagggtcagtggtggattgtaaggctcacctaatggtattccaattcagccaaacaaaatatttgcacagggccaacagagcccctgagccagtggcctactggcaacccctgttgaagggaaaggctttggcaagcagcagaccttagcaggaattcctgcttcctggcagttaactcctgcagcatccacttttaagaactcttgaggaataatggccgggccctgtggctcacgcctgtaatctcagccctttgggaggccaacgcagaggattgcttcagtccaggagttcaagaccagcctgggcaacaaagcaagaccctcatctctaaaaaaaaaaattttttttttttctgagacagagtttcgctcctgttgcccaggctggagtgcaacggtgcaatctcggctcctgggttcaagcgattatcctgcctcagcctcccgagtagctgcgattacaggcacctgccaccatacctggctaatttttttgtatttttagtagagatggggtttcgccacgttggccaggctggtctcaaactcctgacctcaggtgatctgcccatctcagcctcccaaagtgctgggattacagacgtgagccaccgcgcccagccttctaaaaaattttttaaggattaacttgggcatggtggcatgtgccagccactcaggaggctaaggcaggaggattgcttgagctcaggggttcaaggctgcagtaagccatgactgtgccactgcattccagcctgggtgacacagtgagatcctgtctcttaaaaaaaaactgaaaaaaacaagctaagttagccactagcatgtgaacctttatgtgccatgcatattctcatttaacccaataccagctgaaaacccatgtcattattcctagactatggatatagaggtggcatacgcttgtttaaggtcattgagccagtggaggtcatgttttcaagaaggctgggcaggctgggcatggtggctcacacccgtaatcccaacactttgggaagctgaggcaggaggatcgcttgaggccaggaatcgaagaccagcctgagcaacatggcaagaccccatctctacaaaataaaaaaaaggaataaaaaaggaaggccgggcccaaacttctctgaattgggtgtaacatcatgaagccaggcactttcataatttcacttccattccattttaaatcaagttttattttgggagaatactggcacagatgattcaagaagatatatacccactaactggttaagaagtggtttgactataatcccagcactttgggaggctgaggcaggtggatcacgaggtcaggagttcgagaccagcctgaccaacatggagaaaccccgactccactgaaaacacaaaaattagccaggcgtggtggtgtgcacctgtaatcccagctacttcggaggctgaggcaggagaatcacttgaaccctgaaagtggaggttgcagtgagccgagatcacgccaccgcattccagcctgggtgaaagaatgagactccatctcaaacaaacaaacaaaaaaaagtagtagttaaggcatgatggctcatacttgtaatcctaacctttgggacacaaaggcaggaggactgcttgagggcaggggtttaagaccagcctgggcaatatggtgaaacctcacgtatacagaaacaaaaactaagaaagtcatctgggcatggtggtgggcgcctgtggtcccagctactcaggaggctgaggatcccttaagcccaggagttcaaggctacagtgagttataattgtgccagggcactccagcctggacaacagagtgagacccatctctaaaaataaaaagtgtttctttttttgagacagggtctcactctgtcacccaggctggagtgcaatagcgcgatctcagctcgctacacacagcctcaacctctggggctcaagtgatactcccaccttagtctgttgagtagttgggaccacaggcgcacggcactactccaggctaatttttgtatttttagtagacatggggttttgccttgttgcccaggctggtctcaaactcctggctcaagagattcgtccgccactgcctcccaaattgctgggattacaggcataagccacagcacccagccttcaaaaaaaaaaaaaaaaagaaaagaaaaaaagcgggggttgaaccaaatatccatccctccccaaagacccaaatcagaaccggactggcccaaccaggtcagttaacaagcctaaggaaatagaaaaatggcaaagagtgctttcacaaatccagctggaagtgtccacgcctggtgagggttcctctgactcacgcacacctcacttgaacaagttttcaggaatgaactgatggcgttcatgaacaaggggctgggaccagtgctcccactgatccttgtgcacggaagttggacagaggcatgaactgctaaagccagggcctccaacattagacacacactaaagaacacacccatgaacacacacaaacacacacgaaagtgtagccagttctcattagcaagacttccctgatgcccacggctcacaggcacagatttacaggaaaagaccaaccatgcagccttcacgcttcccgggccctgcgctgcaatgcacggttaaagttcctgccaaaacatggactttcccaaggagcaagaaccacacagtcccaactgacagaatgagtaccccacggaaggctgggctctcgaacatgagccagcccagcccaggccccgacgggtgacatccgtctctggaggccgccatcgagatgcacagctttgggggaaaggcactgagggaccccccaccacagaagcgcccccggggaccgggccggacaccggaagtggaggccgaagtgccggtgcccgaggggtgtccgttggccgcgggctgcccacttcctgtgcgaccaagctggagtcaagagcccggcccaccgctgcttgaagaaggggaccccggaaacgaacccaaagcttgctgtatttggggatcaaaagagaacccccaccccgcctagtttctagccaccagggagctacgggggaatccacggtccattttggcgccaaacagcccgggcacgcgcgaccggaagtgccaccctgcccgcgccaactgccgctgcgcgccgcaccaccccacgcatgcgcgcccgtctgtcagcagcggccaccggccaccccgaggggaagcgaccccccacccagcgccctgcctgtccccctgagtccgtgttcccccccatggtacctaccgcctgcggacatcgtcgggcagcgagatggccgggacggccagtgtgggcacccgggctggggcggtacgcgccggcatctcggaggcttcagcagacgcggcggcggcagcgcaggcgccccggcttttcgcgcggaaaccgatggggaggggcgatgagcggaggcggcgtctaccaccccagtccgggcgtgggggaggaggggatgtaccaaacggagagaggcgataccctgtgcagaaggatggaacggagccggccatgcccagggaacacgcatgcgcaaggcgggcacacaccccccccacgcggagcagtgggctcgtccaagctccacggtttgctgggaggtgggcacggtgcccgaggcattcattcattcattctttcaggtgtgatggggataaagcagcgagaagcccccaagggtttgtgagagcccttgagtaaagtcctcagttccaatccaacctccatctatttgctggctatacgaccttaggtgggtcactacggctcagcctctgtgtcctcatctgtaaaacggggtaattgcacctactctagaaaatcttgagtatacacagaatttgtagctagtaccaagaatctcacagtgtatagaggcccatgccacttctatacccagtgtgtggggggttttttgttgccttttttaagcaccacgtggctcacgcctgtcatcccagcactttgggaggccagggtgggaggatcgcttgagcccaggagttttagaccagcctaggtaacatagagaaactgcatctcaaaaaaaaaaaaaaagaaagaaagaaagaaagaaaaaaagaaaaacaaaaattagctagtcgttgtggcatgtgcccatagtccaaactactccagaggttgaggcaggaagatcacttgaaccggagaggcagaggttgcagtgagccatgattgtaccactacattccagcctgggagacagagcaagaccttgtctcaaaaaaataaaaataaaaagtaagaataaattaagaagcaccatgtcaggcgcagtggctcacgcctgtaatcccagtgctttgagaggcccaggtgggaggatcgcttgaggttaggagttcaagaccagcctgagcaacatagggataccccatctctacaaaaaatacaaagatttgctgggcatggtgacacacacctgtaatcctagctacttgggaggctgaggtgggaggatggcttgaaccctggcagtgtaggctgcaatgagccatgattgggccactggactcctgcctgggcgacagggtaagaccctgcctcactctgtcaccccggctggcgtgcagtggtgagatcttggctcactgcaacctctgcctcccaggttcaagcgattctcatgcctcagcctccctagtaggctgggattacaggcgtactccaccacgcctggctaatttttgtatcttcggtggtagagacagggtttcaccatgttggccaggctagtctgggactcctagcctcaagcagtccacttgcctcagcctcccaaagtgctgggattataggcctaagccaccgtaaccagccagaattttttttttttttaaagcaccagaacatgggggaaagattgtgtctttaacaaatggtgctgagaaaactgtataaccacatacaaaagaatgaagttggacccttaccttacaccatatacaaaaacacaaaacttattaaagattaaacataagacctgaaactatagtgctcctagaagaaaacatggggaaaagcttcatgacaatggatttggcaatgatttcttggatatgacagcaaaacacaggcaacaagacaaaagatagacaaatgggtttgcaacaaacttaaggatagctatacagcaaaagaaatgaccaacagtgaaaaggcaacctacagaatggggaaaaaaaaagtttgcaaactgtattatctggtaaagggttaatatccggaatatatgaaaaattacagccaggcatggtggttcatgcttgtgatccctgcactttgggaggcccgggtaggcagatcacttgagcccggtagttttagaccagcctgagcaacatggcaaaacctcgtctctaccaaaaaaagaagaaaaaaattatataaaaaataaattactacccgtcaggcttggtggctcacgcctgtaatcccagcactttgagaggccaaggcgggtggatcacctgaggtcaagagtttgagaccagcctggccaacatggtgaaaccctgtctctcctcaaaatataaaaatttgctgggcatggtggtgtgcctgtaatcccagctactcggaaggctgaggcaggagaatcacttgaacctgggatgcggaggttgcagtgagccgagattgcaccattgcgctccagcctgcgcaacaagagagaaactctgtctcaaataaaaatttaaaaaataataaatttctacaatgcaacaacaaaaactcgatttacaaatgagcaaatgggctgggtgcggtggctcacacctgtgatcccagcactttgggaggcccaggcggcaggcggatcacgcggtcaggagatcgagaccatcctggctaacgtggtgaaaccccatctctactaaaaatacaaaaaattagccaggcgtggtggcagtcgcctgtagtctcagctaatcaggaggctgaggcaggagaatggtgtgaacccaggaggtggagcttgcagcaagccgagattgcaccactgcactccatccagcctgggcaacagagcgagactccgtctcaaaaacaaacaaaaagagcaaatgatttgaatacatactttcccaaaggagatatgcaaatagaaaacaggcatatgaaaagatgctcaacatcactggtcatcagggaaatgcaaatcaaaaccacaatgaaatatccctaagaccccttagaatggccactgtcaaataataagtgttggtgaagatgtggagaaactggaacccttgtgcacggttgagagtcgaataaaatggtggagctgctatgagaaacagcatggaagttcctcaaaaaaattaaaaatagaattatcatatgatccagcaatcccatttctggatataaattcaaaagaattgaaaagaggatcttaaagagatatttgcatacccgtcttcattgcagcattagtcacaacagccaagagacaggaaaaaaaaaaaaaaagatcatattgctgctaagagatggggtcttgctgtgttgcccaggcaggtgtcaaactcctgggctcaaggcatactcctacctcagcttcttaagtagctgggactacaggtatgtgccaccacaatgggctaactttttatattttttgtagagacaggatttctccatgttgcccaggctggtctcaaactcctgagctcaagcgatctgctggccttggcctcccaaagcgctgggattacaggtgtaagccactgcacccagcctaattcagtctttaaaaaagaaaaaatggccaggtgcagtggctcacacctgtaatcccaacactttgggaagccaaggcgggtggatcacctgaggtcaggagttcgagaccagcctggccaacatggagaaaccccatctctactaaaaatacaaaattagctggacatagtggctcatgcctataaccccagctactccggaggctgaggcaggagaattgcttgaaccctggaggtggaggttgaggtaagctgagattacaccattgtactccagcctgggcaacaagagggaaactccatctcaaaataaataaataaataaataaataaataatataaaagtaaaaatacaaaattagctgggtatggtggcatgcacctgtaatcccagctacttaggaggttaaggcaagagtactgcttgaacccgagaggtggaggttgcagtgagctgagatcacaccattgcactccagcctgggtgacaagagtgaaactccgtctccaaaaaacaaaagaaaagaaaaaatatcttattatatgctacaacatggatgaaccttgaggacattacgcacagtgagagaacctaatcacacaaagacaaataccatacaattccacttatgaagtatctaaagtaatcaaaatcttagaaacagaaagtagaatagtggttaccaaggccgggggggaaggaggaaaaggagttattgttcaagagtttcagttttacaaaatgattccagagatctgttgcacaacaatgtgtatatactgaactgtacactgaaaaattgataagatggtaaataaaatactattagtaaatggggctaagtttttttctttttttttttcttttttttttttttttgacagagtctcactctgttgcccaagctggagtgcagtggcacgatctcggttcactgtaacctctgcctcctgggttccagcaattctcctccctcagcctcccgagtagctgggattacaggcacgcgccactacgcccagctaatttttgtatttttagcagagacagtgttttgccatgttggccaggcttgtcttgaactcctgacctcaagtgatccgcccacctcggcctcccaaagggctgggattacaggcatgagccacggcacctagccctaaaaagtactttaccttcaaccacaagaagcaccagaaaggagtttaaaattagggcatacttttacatttttgtattgcaaaatatttgtattataaaattcacaagtgaatgtgtttatatgcatgtacatatacatgcacacacagttcccccaacagctggtagggaagggtcatcctggccagaagtgaaccttcacacagaccctccatttgctatgaattgctcacacttggcaggacccaggaagactgaataataagactaaaattcccagcgattaatattgaatcagcacttacgtagtctaccaggctctttagataactttttctttttcaattttttttttttaatagagacagggtcttactatgttgcccaggctggtcttgaactcttgagctcaagcaattacaggcatgagccactgtgcctggggctttttgtttttgttgtttgttttttgtttttgagactgagtctcgctctgtagcccaggttggagtgcagtggtgcgatctcggctgactgcaagctccgcctcccgggttcacgcaattctcctgcctcagtctcctgagtagctgggattacaggtgcccgccaccaagcccagctaattttttgtttatttttagtagagacgaggtttcactatgttggccagactggcgtctaactcctgacctcgtgatctgcctgcctcggcctcccaaattgctgggattacaggcgtgagccaccgcgcctggctgttttgttttgttttgttttttgagacagggtttcactcccgtctctcaggctggaatggaatggtgtgcaatctcggctcactgcaacctccaccttccaggctcaagcaattatcttgcctcggcctcccgagtggctaggaatacaggcatgcgccagcacgcctggttaatttttgtagagacaaggttttgccgtgttgcccaggctggtctcaaactcctgaactcaagtgatcctcctgcctcagcctcccaaagtgctataattacaggcttgagctactgtgcccagccttcttctattttgagacagggtctcactctgtcacccaggctggaatgcagtggcacgatcaccattcactgtaacctcagcctcccaagctcaagcaatcctcccatctcagcctcccaagtagctgggacccacaggcacacaccaccaggcttgactaattttttatatatttttgtagagacagggtgtcccatgttgcccagcctgggaattatttaatttaatccttaaccataaaaggtaggtagcaggaccctgtttgccatggcctgaaatattcatcacataggactctcagaggccacttacccaagatcatagactcactcagcagtacggaccatgaatccagctgtctttcatccagaacctgagggcaaaacagtggccccagggatggccagttgtccaggccatgggagaccaaagggatagcacttgaaggaagctggactagggtaggaacagaaagggaatgacagaagacagtctcaccagagtgaaccttaggcccataaacctgtcagaacccatgatcagggcccctaacccaccttagagccaggggaggaaataagaagaggggacagatgaacagacctcctactcagggacttcaacgcaaggagaccagctgcatttattggagacttcctctaagctagatttcctttgtaacagcattgtcaaccttgtcaggaagagatagcttgacccatcttccagatatggggaaaaaactcagatatggaaacgatttgccttaagggtaccctgcaagttggaatttgcttccaagttgtctgggcaaaaaatccaggcatctcctttcatgcctctccttgcctcacatgcaaaacatgagcaagctctgctggttcttcctctaaaatataagccaagtctttctacttatccacgctcctgctaccccagcccaaactgccatcatcactcacctggacttcattctagaagcctcctccctgacctcccagctgccctggagagtcccttccaaacgcttcggctagaaagctttattttatttatttatttatttatttatttatttagagacagagtcttactctgtcacccaggctggagtgcagtggcacaatctcagcccactgcaacctctgcctcccggattcaagcagttcacctgcctcagcctcccaagtagctggaattacaggcacttgccaccatgcccggctaatttttgtatttttagtaaatacaaggcttcaccatgttagccaggccaactcctgacctgtgatacacccacctcggcctctcaaagtgctgggatcacaggtgtaagccaccgcaccaggcctttttttttttttttttttttttttttgagatagagtctcactctgatgcccaggctggagtgcaatggtgtgatcttggctcactgctacctccatctcccaggttcaagcaattctcttgccttagccttccaagtagctgggactacaggaacgagccaccatgtccagctaattttttgtatttttagtagagatggggtttcaccatgttggccaggctggtctcaaacacctgacctcaagtgatccactcgcctcagcctcccaaagtactgggattataggtgtgagctacgtgtccggcctttttttaaacaacaacaacagcaacccagctagggtctcactgtcaccacaggctggagtacagtgacatgatcatagctcactacagcctcaaactcctgggctcaagcaatcctcctaccttagcctcccaaagcactgggattacaggcacgagccactgcacctggccctgagaaatgtttacaaaaataaattggaacatgccatccccttcttcaccactaaaaccttccagaacttcccattgttcttgaaataaaatctaagcattttactatttttacagggtcctgtttgggtgagtcttattcctcccttcactgagcaccagttttggggtgtttttttttttttttttgagacggagtttcactcttgttccccaagctggaatgcagtggtgtcatctcagctcactgcagcctctgcctcctgggttccagtgattctcctgcctcagcctcccgagtagctgggattataggcacgcaccaccacgcccggttaatttttgtatttttagtggagacagagtttcaccatgttggccaggctagtctcgaactcctgacctcaagtgatctgcccacctcagcctcccaaagtactaggattacaggcatgagccactgcacccggcctagctttatttacattttgtgtttttgagacagagtctcactctgtcgcccaggctggagtgtcgtggtgcaatcacagctcactgcagcctccaactcctgggctcaagcaatcaccctgcctcagcctcccaagtagctgggactacaggtacacatcaccacgtctgactagttttgttttgttttggtagagacagggtcttgctatgttgcccaggctggtcttgaactcctgggctcaagcgattctcctgcctcagcctcccaaagtactgggattacaagtatgagccactgcccctggcctctcaagttcttaagtgccccaaagcctttgtttttgctgccacttctgcccaaatcaaccttctggaagattcacacagctcaacgttgcctcaaaacagaggcttccccagaccactgggaagcaaccctttacccacctagtcatgctttactattactgttttttcgtagcatttaccactgtcaaagattctttttttttttttttttctttcttagagtcttgctctgtcacccaggctggagtgcagtggtgcaatctcaactcactgcaacctctatcttccaggttcaggcaattatcctgcctcagcttcctgagtggctgggattccaggcacccaccacctggctaattttttgtatttttttagtagagacgggggtttcaccatgttggccaggctggtctcgaactcctgaactcaggtgatctgcctgcctccgcctcccaaagtgctaggattacaggtgtaagccactgcacccagcctgagattttcttatttactatctatcgtaatctgtctgtcccacaagaacaaagcagggattggcacacattttctctaaagaaccagataaatatttcgggtttcatgagccacacattctatgccccaactactcaaacctgccatcatcaaagtgcagaaatagccatcaccaatatgtaaatgagtaggtatgactgtgttccagtaaaactttatttataaaaacagatggccagccagatttggccttcaggccttagtgtgctgactcctccacagactacaagcttcagaggaatgcaaatataggttgaattaacatataggacatgaggccaggcatggtggctcacacctgtaatcccagcactttgcgaggccaagtcaggtagatcacctgaggtcaggagttcgagaccagcctggctaacattgtgaaactccatctctactaaaaacacaaaaattaggccagacacgatggttcacacctgtaatcccagcactttgggaggccaaggcaggcagatcacctgaggtcaggagtcgagaccagcctggccaacatggtgaaaccctgtctctactaaaaatacaaaaattagctgggcatggtggcgtgcacctgtagtcccggctacccagaaggctgaggcaggagaattgcttgaacccaggaggcggaggttgcagtgagccaagatcgtgccattgcactcaagcctgggcaacagaacaagactctgtctcaaaaaaaaccctcaaaaattagccgtgtgtggtgtcatgcacctgtagttccagctactcaggaggctgagacaggagaattgcttgaacccgggaggcggaggttgcagtgagccaagatcacaacactgcactccaacctgggcgacagagcgagaccctgtctcaaaataaataaaagtaaagttgtttttcccccaacaacagtgtcatttccatttcacaaacagaaacccaaaccagatcaggttacaaacctagttttgtctccagttcctgggtcatttgctttgttcacttgaccactagaaatctcaaacaaagggccaggcacagtgactcacacctgtaatcccagcactttgggaggccgaggcaggtggatcgcttgaggtcaagaatttgagaccagcctggccaaaatggttaaacctcatctatgctaaaaatatgaaaattagctgggtgcagtggctcacacctataatcccagctacttgggaggctgaggcaggagaatcgcttgaacccgggagtttgaggttgtagtgagctgagattgtgccactgcactccagcctgggcaacagagtgagactccatcaagaaagagagagagagaaagacacacagagagagagaaagcaagagaaagagagagagagacagagagagagaaagagagagagagaaagagagagagagaaagagagagaaagagagaaagagaaaaagagagagaaagagagaaagagacagagagagaaagagagaaagagaaaaagagagagaaagaaagagagagagaaagagagaaaaagaggaagagagagaaagagaggaagagagagagagaaagagagagagaaaggaaagagaaaagaaaagaaaggagaaggcctggcgcggtggctcacgcctgtaatcccagcactttgggaggccaaggcgggcggatcacgaggtcaggagatcgagactatcctggctaacacagtgaaaccccgtctctactaaaaatacaaaaaaaatagctgggcgtggtggtgagcacctgtaatcccagctactcgggaggctgaggcgggagaatggcgtgaacccgggaggcggagcttgcagtgagccgagattgcaccattgcactccagcctgggtgaaagtgtgagactctgtctcaaaaaaaaaaaaaatgaaaggagaaaagaaagaccaaacaaaggtcgagtacagtggctcatgccttacctgagagaaggaagtggagcctctaaaagaaaacaggtacagatttcatgggcattcactctgcctccacctctcagcctccaaagtcacatttcctaatatgccacaagacagacttgccaggccaggcatggtggttcatgcctgtgatcccagcgctttgggaagctggggcaggattgcttaaggacaggaatttgaggctgcagtgagctataatcatgctactgcactctagcctgggcaacagagtaagtccacatctctaaaaaacaaaaaataaatttaggccgggcacggtggctcatgcctgtaatcccagcacactgggaggccaaggcaagtgaatcacttgaggtcaggtgtccgagactggccaccatggcgaaacctcatctctactaaaaatacaaaaattagctgggcatggtagcaggcgcctgtaattccagctactcgggaggctgaggcacaagaatcacttgaacctgggaggtggaggttgcagtgagccaagatcatgccactgcactccaccctgggtgacagaacaagactctgtccccaccaaaaagaaaaaatgtaaatgaaaaggaaagatctgccaggccatagctccttgcttcccaggccacattccagggaggccaggagaggcccagagaccagtctaaccgaggtccaggcagcccagagcacgaaggctggtggagagctggccacgtgtcctgagctacggtcagtcagaaggctgaaggtgagtcatcccagacaccgtgctcagtgccaggcccatcagaggccctgggcaggaacagcagcactcagtaacaatggggacactttaccacccttaccctggaagggcctcagaagcactctctccaggctcgacttgcctaagctaggaatcagatctgcagaaacccaagtcccatagcgtgtgctgggtagagccgcctactcctcgtggggcctttgagcaggcagacagctctctgttggggatcacaagaggcttgctgccaagccctgtgggtttttccttcaaagagcccttgagtcagctgatctgcccctcctgggcccctggcccaggtcaccctcacctttctgctggatgcctgcccagcctcattcctgggctgctacttggccccctcaccatccattcaccacggaagaagttcatcagaacccaaatctgatcatgttagctcctccctacctcaccgaatcccctgaatggcttctcagggctcttagggtaaacccaaccctaccttctccgctgcagcccacaaggcctcagtgcccagccctgtcttgtcctttcagctcctgctgcccacctattaacccactccacttgagccacatcatggacagttccagcctctttctgcctaagacatgtggtggccagcctccaagaaggccctcaatgtctcttgcctcttggtattcatgccctgccaagccttcttccatagtcagggccagtttatgtggccaagagaaggtgagtgacttccaaggctagatcataaaaggcattgcagcaccaccttgtgttccccaggaaaccagccgccatattgtaaggatgctcaaacagccctgcagggaggcccataggaagagaaaccaatttatcagccaggtgagtgagccatattggaagtagctgcactccagcccccatcagacctgcagatgggtggaaccacagatgatatgtgactgtaacctcatgagagacgcctaacagagctgctcccaaattcccagcccacagaaaccacaggatataatgcatgggtgttgttctgagccactggggtttgaggcttgttgttaatgcagccatagatatgtattgcaaggcttctgcatgtgctgtttccttagcttggaaagtcctattctacacgcccagttctcctgcttggataatctacaattattctccctattgtggctcaaccatgacctccttcaaggagcctttcctgacctcccctagccctttcaggtctttgttccatggtcttttagaagtcaggccctttctttcagagcctttaccccagctgttgatcatatattttgagatttacatcagccatacccccaccgatgcccagtgtgtagcaaagcacccaggatgtagttagcacccaataaagtgttatggagccctacacagatgagagagggtacgaagcctgttcttcccacattaaatgctcagtttacaaatatccatcaaaattaccaacaggctgggcagtggctcacacctgtaatcccagcaatctgggaggccgaggcaggtggatttgcttgagtataggaattcaaggccagcctgagcaacatgacaagactcatctctgcaaaaaaaaatacaaaaattaggctgggtggatcgcctgaggtcaggagttcaagaccagcctgaccaacatggtgaaaccccttctctactaaaaatacaaaatcagccaggcatggtggcacatgcctgtaatcccagctacttgggaggctgaggtaagagaatcgcttgaacctgggaggcagaggttgcagtgagctgagatcacgccattgcactccagcctgggcaacaaaagcaaaactccctctcaaaaaaaaaaattagctggacatgatggcaggcacctgtagtcccagctactctggaggctgaggtggaaggatcacctgagcccaaagaggttgaggctgcaatgagccatgatcacaccactgtgctcccacctgggtgacagagtaagaccctgtctcaaaaaaaaaaagacaactcagacacatcacatatctaaatacgaaagcaaagtcaggaaagcttttgaaataaaacacagaacatctatgtgacttgtggacaagcaagtgtttcttcggcaggacacaaagcacattaataaaagaaaatatgctggactctatgaaaatgagtttttgggtttttttttttttttttgagacagggtctgtctcccaggttggagtgtagtggtgcaatcacagcttactgcaatgttggactcctgggctcaagtgatcctctcacctcagcctccagagtagctagtagctggggctataggtatgcaccaccacacctggctaatttttttttttttttggtcgacacagggtcttactatgttgcccaggcaggtcttgacctcctggcctcaagtgacccttccaccttggccttccaaagtgctgggataacaagtgtgagccaccatgcccagctgaaaatgagttttggttcatcaaaagatgccattaaaaaggaagccacagacagccgggcacggtggctcacgcctgtaatcacagcactttgggaggtcgaggcgggtggatcatgatgtcaagagcttgagaccatcctggccaacatggtgaaaccctgcctctactaaaaatacaaaagttagccaggcgcagtagtgggcaccagtaatcccagatacttgggaggctgaggcagaattgcttaacccaggaggcggaggttgcagtgagccgagatcgcgccactgcactccagcctgggtgagagagcaagactccatctcaaacaaaaaaataaaagccacagacatacgtctgacaaaagactcatacctataatacatatagaactccttcaacttaatgacaatcacttttttaccaagtggctaaaagagctaaataggcacttcacaaaagaggatgcccagatggccaaggctaacgtgggaagctgctcaacttcattagtcatcagggaaatgcaaactcaatctgcaatacaatatcaccctcacacgcacacacacaaatgaaaaaaaaatttttttcaagtattggcaaaaccagaactcttctatgctgctggaggaagtctcaaatggtatagccgctttggaaaatgatttggcaacatttgctaaagccaagtctactgctgcccaggacccaccaatcccatgcctggaatgagtgtatatatctaccaattgacatgaacaaggaatgttcataatagtttactcacaatagccaaaagctgaagactacatgaacaataatagaacagataaatagttacttattcacatggaatattatacacaagggtcataaactttcttttttagaggcagggtcttgctgtgtcacccaggctggtgtgtagtgatgtgatcatagctcactgcagcctcaacctcccaggctcaagcaatccccctgcctcaggctcccaagtagtagctgagactacaggcatgcaccaccacacccagctaatttttttctttttttgtaatcccaaagagttgagattacagacatgagccactgcgcccagcaaaaaataaaaaaaatcaaaatttaagttagctgggcatggtggcacaagcctgtggtctcagctactcgggaagctgaggtgggaggatcgcttgagccctggagataaaggctgcagtgagctatgattatgccactgtactccagcctgggcaacagagcaagaccctatcttagaaaaaacagacaaacaaaaaaagtgaatttcaaaaaccttatgctgtatgaaagaaaccagtcataggagggtacatactgtgtaattctgattatagaaattaccaaggcacttatcttcatttttctcacccacttcaaacttaggcttccttttttccttccaggccacttacaccctgccttcctccctcaactcttcccagcctccttctgcctgccagggtccatgacatggccattgtccatgaaagccacaagccctagagaaaaaatgccagttacaggccagagacttgcccacctcctggagaatgacgtgaaaatacacagcgtctgctcctgaactgcaaagaaagtttccctgtctacactgcggtgagcaggaataaaagctaggcctgccctggccttaaattaagccagagggatgtcacgtgaggagactccttcctggaaaagaccaccaattaaccacagctgattctccaaaagcaatctgcaagttggggatcattagttggtgcaaaggtaattgcgatctttgctattaaaagtaatgagctgagtgcagtggctcacgcctgtaatctcagcactttgggaggccaaggcgggtggatcacgaggcaggtagatcacttgaagccaggagtttgagaccagcctggctacatgatgaaaccccgtctctactaaagatacaaaaattagctggacgtggtggtgggcacctgtaatcgcagctcctggggaggctgaggcaggagaatcacttgaacctgggaggcggaggttgcagtgagccaagatcgtgccactgcactccagcctgggagacagagtgagactccatctcaaaaaaaataaagtaacatactcattttatagatgaggccagctgacagttgtcatgtgccatccccaaaagctacttgggttgttgagtgtgggatgtgagattcaaatctgcttttcctaacttgatagtatgcacttttaacagttatgccaccacaattgccgacaacaatgaatcacatccgacccacttcatttccctttttttggacagatttgtctattcttggataagacattcaaggaagggtggtggtattgctttctttgaatttcttatccgagaatagttaaatctgtccaaaaaaagggggaaggtggtggtattgggtgtctgaattttgggcaagtatgtcagctttgtagacaaatgggaaaaaatggctagatatgaggatggagagacggtttagaaaccgtttgtaggttttttgtttgtttgtttgtttgtttgtttttagagaggcagtctcactctactgcccaggctggagtgcagtggtgccatcatagctcactgcatcctccaactcctgggttcaagtgatcctcctgctttgccctcctgaatagctgggactataggttcctgctaccatgcccaactaatttttaagattttttgtagagctgggggtgtctcactgtgttgcccaggctagtctcgaattcctggcctcaagcaatcttcccgcctgagcctcctagagcactggaattacagacatgggccacaccacgcccatccagaaaccctttgaagactgctaatgaaacaacagttccaggcaatggttatccatggatgatcaaacctttagggaaacgccaagtggggaatttacaaaggcatggtcaggcggatggcatccgaatccctggatcattcttagttatcagtgaaaagtggaaagaaaggccaggcacagtggctcatgactgtaatcctagcactttgggaggctgaggcagaaggatcacttgagcccaggagttccagactagcctgggcaacatagtgagaccttggttctacagaaaggtttttcggtttttgttttgttttgcttttgagatggggggtctcactctgtcacccaggctggagcgcaggtgggcagtctctgctcactgcagcctctgcctcctgggctcaagcaatcctccctgctcagcctcctgagtagctgggactacaggtgcatgccaccatgcccagcttttttttttttttttttgttttggtagacacagagtttcaccatgttgcccaggatggcctccaacctctgtgctcaagctattttcccacctcagccacccaaagtgctgggattacaggagtcagccaccacaccctgcccaaaaaaggtattgtagcatttttttaagtgttgctaccttttagagataaaaaaatggagtatttacaaatgaaattatttgaggcctcagatttgcttcaaaatatccagtgaggctggctgggtgtggtggctgacacctgtaatcccataatttggggaggccaaggtgggtggattgcttgagcccaagagttggagaccagcctaggcaacacagcgaaacccttctttacaaaaattagccagacatggtggcttgcacctgtagccccagctacttgagaggctgaggcaggaggatcgcttgggcctgggaggtcaaggctgtagtgagttgtgatcacaccattgcactccagcctgggcaacagagtgagacactgtctcaaaaaaaaaaatcctttgaataataattgattcaggcaagaatgaatgctgaaagagtgaaagtctgatgaataataggatatttatagagtctccacatacctccccacaagaaacttaataattacaaaccggaaagcagtaactttatagcagagacacgctggggtcttcctgccaaaaaggcacaacctgaatctaatcataaggaaacagcagacaaacccaagttgaaagacattctgcctaataactaacctacattttgttaaaacgtcaaggtcgcaaaacacaaaaaggctcagaaattgatctccgtgaaagaaactaaaaagacaactggaaacaacaactgatctgggattttcttttgctataaaggtcagtgatgtgacaatgggtgaaatctaattaggtttgcagattttctgcttttgatcattttactgaggttatgttagagaacgccttgttctggccaggtgcggtggctcacgcctgtaattctagcactttgggaggctgaggcaggcggatcacctgaggtcaggagtttgagaccagtctagccaacatggtgaaaccctgtctctactagaaatacaaaaattagccgggcgtggtggcatgcgcctataatcccagctacttgggaggctgaggcaggagaatcacttgaacctgggaggtggaggctgcagtgagccaaggctgcaccattgcactccagcctgggcaacaagagcaaaacgctgtctcaaaaaaaaaaaaaaaaaattgttgagatgggccgggcacggtggctcatgcctgtaatcccagcactttgggaggccgagacgggcggatcacaagttcaggagtttgagaccagtctggccaacatagtgaaaccctgtctctacaaaaaaatacaaaaaaaaaaaaattagccaggcatggtgggcacctgtaatcccagctactcgggaggctgaggcaggagaatcacttgaacctgggaggcagaggttgcagtgagccgagagccgccattgcactccagcccaggcgacagtgtgagactctgtctcaaaaaaaaaaaaaaaaaagaaagaaaagaaaaattgttgagatagtaatcaaaagagctcagttactcagaggctgcagaaactagaaatatgaaatctagaattgcactgcccaatattgtagctaatgatttgttaattaaaattcaataatatgtaaaattcagcccctgcctgcctcacattagtcgtatttgtaatgctcatgacagtgctgctctgaattatggagccgagaatgcttcttagaatatggtgcaagggccaggcacagtggctcacacctgtaatcccagcactttcggaagccgagatgggaggatcacttgagcccaggagtttgaggccagcttagggaacatggcaaaagcccatctctacaaataaaaaatttaaaaagtagccaggcttggtggcaagcgcctacagtcccagcttctcgggaggctgaggcaagagaatcacttgagcctgggaggttgaggctgcggtgagccgaattggcaccactgcactccagcctgggtgacagagtgagaccctgtctccaaaacaacaacaaaacagaatatagtgcaaagactatatatatatatatatatatatatatattttttttttttttttgagacagagtttcgctcttgttgcccaggctggagtgcaatggtgcagccttgactcaccgcaacctctgcctccagggttcaagcgattctcctgcctcagcctcccaagtagctgggattacaggcatgcgccaccatgcccggctaattctgtatttttagtagagacagggtttctccatgttgatcaagctggtctcaaactcctgacctcagatggtccacccgcctcagcttcccaaagtgctgggattacaggcgtgagccactgttccccggccaaggactacatatttttaaattattaggggttcctggtaagaaacacacatttctaggttcattccagacctgtttagtcagaatctctgaccatagagcttgagaatttgcatttaagcaggttcttccaggtcattcctttgttggtccctattaggcaacagcctccctaggggaaaaaggaggtgaaagtcatcttgtgtttcctgctggaaggaccactttaatttgggctccaagatttgagagctatcaacaaatgggatcttcagatccagatattgaggaggatcagatatgattgtgggcccggcgcagtggctcatgcctgtaatcccagcactttgggaggccaaggtgggtggatcatgaggtcaggagttcaagaccagcctggctaacatggtgaaaccctgtctctactaaaaatacaaaaaaattagccaggcatggtggcgggcacctgtcatcccagctacttgagaggctgaggcaaggagaatctcttgaacctgggaggcggaggttgcagtgagccgagatcgcaccattgcactacagcctgggcgacagtgcaagactccatctcaaaaaaattagctgggtatgatggtgcacgcctgtaatcccagctacttggaaggctgaggcgggagaagcgcttgaacctgggaggcagaggttgcagtgagccaagactgcgccattgcactccagcctgggtgacaagagagaaactctgtctcaaaaaaaaaaaaattagctaggcgtggtggtgcgtgcctgtaatcaccgctactagagaagctgaggcggaagaaactctcgaacctgggaggtggaggttgcagtgagccgagactgtgccactgcactccagcctgggcgatagagtgagactctatctccaaaaataaataaataaataatcatttttttgagacggggtttcgctcttcttgcccaggctggagtgcaatggtgcgatctccggcttaccacaacctctgcctcctgggttcaggcaattctcctgcctcagcctcccgagtagctgggattacaggcatgtgccaccacacccggctaattttgtatttttagtaaagacaggatttctctatgttggtcaggatggtcttgaactcccaacctcaggtgatccgcccgcctcggcctcccaaagtgctgggattacagacgtgagccaccgcgcccagctgaaaaacattttaaaaagatataagtgtggtcttcagtgactcactgggttccaatcctggccccttgactcccatgctacttgaccttgggtgaattacttaacctctctgtgcctcggtttctttatctgtcaaaaagccaataatagcacctactctataggattattgtgaggattccagaagtttgcagatgtcaaatgattctcacagtgcccagcacacgagcacacattagactttttattttttgagacagggtctcactctgttgcccaggctggaatgcagtggcatgaccacagttcattgcagcctcggtcacctaggctcaaagaatcctcccacctcagcctccagagtggccaggactatagacacgttccaccacaccagggtatatatgtatttatttacttacttttacagatgaggtctcactatgttgcccaggctcatctcaaactcctggccccaagtgatcctcccgcattggtctcccaaagggctgggattacaggcatgagccaccatgcctggccctattttcttttctttcctttttttttttttttttgagacagagtcttgctccatcacccaggctggagtgcggtggcgcgatctcggctcactgcaagctccgcctcccaggttcacgccattctcctgcctcagcctcccaagtagctgggattacaggtgcccaccaccacgcctgcttaattttgtatttttagtagagatggggtttcaccatgctggccaggctggtttcaaactcctgacctcaggtgatccactcgcctcggcattccaaagtgctgggattacaggagtgagctcccacacctggcactattttcttttcttttttttatttgtttctgttttgttttgtttgttttggtggtctaaaataaattttttaattgcacatttgtgtcttgggttatctgtggggtgagaaacctattcctcacttccaatcccagctatccaggtacaatctggtgttgtggtctggctgtgggcaaggggtacaggtgggtgcagagctggccctcgagtctgcaccaacgtcttcaaggcagggagctcagaccatggttgtacttgcactgctttggggcctcattgaagccctcacacagggacaggtcattctcagtggtcgaacagtccaggaactgcctgatcttgtaggtgcagagccccatctgtaggggctgggaggcagcaccggtgggggtctgactggccagtcggccacactgtggcttccccaaggcctggtggctgtggtgagaccttattatattagatattagatattattatattagatattagagacggcaatggcggcagcagttctgtcgcagggacaaatgccgcccccccttttttttttttttgagatgcagtttcgctcctgttgcccaggctggagtgcaaaggcgcgatcttggctcactgcaacctctgcctcccgggttcaagcaattctccagcctcagcctccccggtagctatgattacaggcgctcgccaccacgcccagctaatttttttttttgagacagagtctcactctgttgcccaggctggagtgcagtggcgcaatctcggctcactgcaacctccatcccccgggttcaagaattctcctgcctcagcctccctagtagctgcgactacaggtgcgtgccaccacgcccagctagcttttgtatttttagtagagacagggtttcaccatgttggccaggctggtcttgaactcctgacttcatgatccacccgtcttggcctcccaaagtgctgggattgcaggcatgatcccaggtgtaatcccaaaattaggcacatggcctaattttgtatttttagtagagatagggtttcaccatgctggccaggctggtttcaaactcttgaccttggctgggcacagtggctcacgcctgtaatcccagcactttgggaggcctaggcaagcagatcacttgaggccaggagttcgacaccagcctgaccaacatgatgaaacccccgtctctactataaatacaaaaattagccaggcttggtggcacatgcctgtaatgccagctactcgggaggctgaggcaggagaatcacttgaactcaggaggtggaggttgtagtgagtcgagatcacatcattgcactccagcctgggcatcagaataagactccgtctcaaaaacaaaacaaaacaaaacaaaaaaactcctgacctcaggtgatctgcccacctcggcctcccaaagtggtgggattacaggcatgagccaccgtgcccggccctattttattttcttcctagcacttaacactcactgaaatgaccatcatttgcttttgttttatttattcaacaagtatttactgaggacctactgtgtgtaggcattccaggcagagggaacagcaggtgcaaaggccctggggtgggaacatgccaagtagtgtttaagatgttagagatagccaggcatggtggctcatgcctgtaatcccagcactttgggaggctgaggtgggaggagcactgagcccaggagtttgagagcagcctgggcaacatggtgaaaccctgtctctacaaacaatacaaaaaagcaggccagtgtgttggcacatacctgtagttccacctacttgggagattgaggtgggaggatggcttgagcccaggaggtcaaggctgcggtgagctgtgattacgtcactgcactccagcctgggtgacagagtcagaccctgtatcaaaaaaaaaaaaaaagttagagagccataaatagccaggcaagttggctcacacctgtaatctcagcactttgggaggttgaggcaggcagatctcttaagcctaggagttcaagaccagcctgggcaacatggaagaatcatgtctctacaaaaaaagaaaattagcaggcttataatcccagttactaggaagcctgaggtggaagtatcacctgagcccatgagcccaggaggttgaggctgtagtgagctgtgattgcaccactgcacttgagcctgggtaacagagtaagaccttgtctcaaaaaaaaacaaaaaaacaacactggagatacattagtaaataaggcaggtgcagtcctatattcacagtgcttgtattttaatgggggtagagacagataaattgatacatattaggttggtgctaaaatcattgcggtttttgccattaaaagtcattgtaggctgggcacggtagctcacgcctgtaatcccagcactttggggggccgaggtgggtggatcacaaggtcaggagattgagaccatcctggctaacacggtgaaaccctgtctctactaaaaaaaaaaaatacaaaaaattagcctggtatggtggcgggcactagtagtcccagctactcaggaggctgaggcaggagaatggcgtgaacccaggaggcggagtttgcagtgagccgagatcgggccatacactctagcctgggtgacagagcgagactccatctcaaaaaaaaaaaaaagtcattgcggtttttgccattaaaagaaatagcaaaagtcattgcaatttttgctattaaaggtaatggcaaaaaccgcaatgacttttgcaccaacttaataatatatactgccaggtaataagcaagtgactcctttctgaggaggtggcatttgagcagagtcctgaagggggagatagagaaccctgtgggtacttggggaaaatctattgactccagcctggcctgtgcctttttcccccaccccaccccccatcccatctagggttcaggtttccaaacagaggttgttgtctcaactgctagagaaggggaattccgatgggggttgcaggccctcagcctctgcggtctgccttctctcccactggctgtcctagtctttgagctggtgttgctgtgtggggctccagcttgggtgcctagggtcccccatcaaagggttcatgcctgaaatcccagcactttgggaggccaaggtggaggcaggaggatcgcttgagcccaggagttcgagaccagcctgggcaacatagggagaccccccatctctacaaaaaaaaaaaaaaaaaaaattagccaggcatggtggtgcatgtctgtggtcccagctacttgggaggctgaagtgaaccatgatggcaccaactgcactacagcctaggcaacagagcaagaccctgtcttaaaaaacaaacaaacaaaaaaactctagacttttcttcaaaggagccactgagccggctgcctgcagacaaaagagaagagtatcaccagggaacccaccgagggacccacccgaggctgcatcctatcttggcttctcctggttcttgatgaacttcgtggctcctccttccatggcaaagagggagctaagtggcctctctctgtctttttttttgctctgctctgtcgcgcaggctggagtgcagtgccgtgatcttggctcactgcattctccacctcccggattcaagcaattctcttgcctcagcttcctgagtagctgggactacaggcacccgccaccacacccagctaatttttgtattttttgcagagacggggtttccctatgttggcaggctggtctcgaactcctgatctcaagtgacccacccacctcagcctcccaaagtgctggaattataggagtgagccactgcactcagctgagtggcctttctctagcccagtggtggatccagtatggtctggagtcagcctgcttgggttcaaatccagacaggcgctaccccgactagcgctgtgtgactctgagcagtttgcttgatctctctgaactcacacctccataagagtttatagtaacttccacctcctgagcagtcaagtctttatgcctggaaagtgctcggtgaagatcagccattacttttgggaacaccgtgtctaagggtgggtatctgggttctttgtagccccctcaaaccatctctccagctccccgggaggcacatacaattgggaggatgtaggagcctcccaccacctgccaggctgtctccttcagagaaagcagggagatcccagaccgagttaatccctgggaggtgcaggtgagttgcccctgggaaagatcccggttgacctctgttttctcctggctcaggccgggttaagggtgtcaggagcacagaatgggaaggttggcaaaggatgagttactcaggcagcagcccccctcctgttccatccagcccagccatggggcgctcctgggggaaattgctccccgaaaagacacaccaaccacaggaaacagaaattgaaccgtttattagcctaggtctgggtttcaggcattgcggaggcacgtctggggagctctatgaggggaaacaagcccctgactggctccttgccccccaaagacccgctcccccaggctttgcattcacaagaaattactctgaggcatgaggtttccttccccaaggtgagctgcaccccagctctccagtgggaggatgggccagcaattccaaaggggtctgggcaggaccagagctccccgactttggcagcttcaacacaaacatgagcagacaggacagcattcattctgggggaaatgtgacgaggagaggagggtcacagacatcacgcctatgtgcacacgcgcgcgcgcacacacatacacacacacacacataaatatacgtttgtaccgtaacatcccttccattatccacaggtttttgtgaagtccttctggggggttaggggagagtgtccccaggaaatgtccctagccactgccacccccatgctccattctatataacttgaaagaagaaggccgggcacagtggctcacgcctgtaatcccagcaattggggaggccgaggcgggcggatcacttgaggtcaggagtttgagaccagcctggccaacgtagtgaaaccctgtctctactaaaaatacaaaaattagccagacatggtggcaggtgcctgtagtcccagctactcgagaggctgaagcaggagaatcgcttgaacccgggaggtggaggtggcagtgaacggagattgaaccactgccacctcagcctgggtgacacagtgagactccatctcaaaaacaaaacaaaaatcttgaaactgtctcaaaaaaaaaatcttgaaagaagacacagcggggttcttgaaagaagacacagagaaggctcaaggcttctctctgccttgctcaggagacctggtaccttagctggggctgcaggtgtggagctgagaatagcttggggggtggctgtttttgaaaggagggtgtctgtgcaaatatcacacccagaattttctcaagttgcgccttgcatcaagagtcccaaagtcctccccagccacccaaactcgtttttctcacttttggtgattattctgtgccccaaatagtgcaactgagcaatgaggtctgagaatgaggaatggacctcagccgccatcccctccccacctccagccgtggtttccgggcctcagagagacggggagaagtcgtcaagtggcagctgatgaaatttggggaagctgtggatttgggctctggatggtcagagaggaggcctctagctcctcaggacagtggttctgtagtcgcacgaagttgcccagagaaggtggcaggaggaatacattcgaaaaggagaaatcggtgcaggactaggggccagggaagaaaatgcagaaattctttgtaccgccaggtgaggtggcttacgcctgtaatcccacactttgggaggccaacacgggcggatcatgaggtcaggagttcgagaccagcctggccaacatggtgaaaccccgtctctactaaaaatacaaaaaaaaaaaaaattacctgggcgtggtggtaggcacctgtaatcccagctactcaggaggctcaggctggagaatcgcttgaacctgggaggtggaggttgcagtgagctgagaccgtaccactgcactctccagcctgggcaacagagcgagacttcatctcaaaaaaaaaaaaaaaaaaaaaaaaaaaaaaaaaaaaagccgggcacggtggctcacgcctgtaatcccagcactttgggaggccgaggcgggcggatcacgaggtcaggagatcaagaccatcctggctaacacggtgaaaccccatctctactaaaggtacaaaaaattagccaggtgtggtggcaggcgcctatagtcccagctacttgggaggctgaggcaggagaacgacatgaacccaggaggcggagcttgcggtgagccgagatcacgccactgcactccagcctgggcagcagtgcaagattccgtctcaaaaaaaaaaaaaaatcctttgtaccaggtggtaaagtgctcctgccctgagctccccttaaatgctgcctgccctcaccctggctcttcacaggtcccctgccctggcctccccaggatccagttctaaaggggtcacactagccactggactggccctcaggaccgcactgcaacactgctatgtgactagtcagtgccttatctggcctttccaggtgtgaaatatttgcaacatcacccaggtctgtggggcgggggcatctggctcagtagccccaagtctctatctggggtcacccagtggcctctccatgaacccctctgccctggcctggttgttggtccacccccaccctcagaccaccgtgttgccctccagaaacgtgggtgacgtgggcatgtgcatgcccctctccagggagctggagctgcggagtggcaggaggtggtggcccggggtcccgccccgcctccgtccttgcacccccacccccggcctccagcactgcagcggccgaagcacctcccgccgcaggtcccggctgcgccacgtgtagatgacggggttgagcagggaattcagggtggagacggcgaaaaagtagtgggctttgtagaggatcgggcaggagtggacgggacaggcatagtccagaaggaggatgctgaaggcgggcagccagcagacgataaagacgcctagcacgatggtgaccgtcttgagcagggctagcgtctgcggggcggccatgtcagcgtggcttgagcggaccacgcagtagatgcgcacgtacagggccacgatggccaacaggatgatggagaagatggtcaccacgcacagcacataatgcttggcgtagagaggcaggacagtggagcaggcctcgaggtggcccaggcagttccagccaaggatgggcaggccaccgaggaccagcgagatgagccacgaggccccgatgagcagaagcatgcggcagctcttgtcgctgccatacagcttgaccttggcaatggccacgtggcgctcaatggcgatggccaggaggctgaagacagaggccgagagcgtgatgaaggcagagccctcccgggcaaaccactgcacaggcgtcagcctcagcgtgacagagccagagagcaaggtattggctacgaaggccacgcctgccagtagatcggaggcggccaggttgcccagaaacaggtacattgccgagtggaacttgctgtttcgggccaccgcaatgagcaccagaaggttttccaccacaatggcgcaacagaggatgacgatgaaggccgaggccacctggcgggaggtcgtctcctgcgtttccagcgtctccttggtataattatagtgttcctggaccttgttggggttcaggtactccgagtacaagctgcccatggtggggctcagaggcctgctggggccatggggctttcagaactgcagagaagacagacagacagacagacaataggtcagagctgtggctgctacctgggctctggcctcggatgggctgagattcaatttcctgctctgttactcttcgaggaagggccacatgaattcagaatcatcatcatccccacttacagacgggaaacccagagagattaattcactttcctaaagtctcaaatttaaccagcggcagggccagagagactggctctgcggcctctataagccctaggctacgctctttcttatttattttatttatctatattttaaagacaaggtcttgctctgtcattcaggctggagtgcagtggcgcaatcatagctccctgcagccttgaactcctgggctcaagtgatcctcccacctcagcctcccacctcagcttcagctacaagcacatgccaccacgcctggctaattttttttttttttttttttttttgagatggagtctccctctgttgccaaggctggagtgctgcggcacggtcttggctcactgcaacctcctcctcctgggttcaagtgattctcctgcctcagcttcctgagtagctgggattacgggcacctgccaccaggcccagctaattttttttttatttttagtagagacagggtttcaccatgttggccagcatggtctcgaacttctgacctcatgatccgcctgcctcggcctctcaaagcgctgggattaccagtgtgagccaccgggcccagccgcctggctagtttttttgttttttagagattgggtctcactgtgttgtccaggctggtcctgaactcctggcttcaagcaattctcctcggcctctcaaagcaatgagattacaggtatgaaccatgacatcttgcctcttttaattttcattattattttctagagatagggtcttgctctgtcacccaggctggagtgcagtggcatgatcatagctcacagttgtctctactcctgggctcaagtgatcctcctgcctcagtctcctgagtagctacacgctttcaaagggaaagaagctcccccaaatggcatgaaaaatataatgtggacttccagaaaccttgcccacctacccagagagcaagccctaggcaggtcctggagggtttgtctcttttctggaacacacaggcgcctgcgccctcatgctgacctgggtcagggagagtctcaccactgatagctccgtgccctgctcattcattaccacccactaacgctggatttcaggctgggtctaagccttgaggccacgggtgctcccaagataaggtcttggggagacaccagggcggccctgagattcaaacatcccagaggtcacaccatcttcaaggacacagaccttgaaggcaatccagaatttgctcccattccacctctgaaacactgggcaagtccctagacgctgtctcagcctgaacctccttatctgtgcaatagagagaagaaagcccacttcatgggggtgatgggaaaatccttttaaatgacgcatgaggcacgtttagctcatagtaagcactcaacaaatactgccaaatgttattagctcccctctttcctccagtcctttgggaagggaagggatgtaagccaaccagacgagatctccaacagcctgttctcatcagcaccatctagctctgccctgggacagaaggtcctgccgggatgggcagggcgctggcaccccctccccagccaggatgaaatccagatgtgaggcccctggaacaaacagggtggagtcctcactctgcagtcacatccggtgtgaggaaggcgggatgtagggggagtcaggatgggagagaccccatctgggaggtcctggctgggaggatggggcagctttgctgaagtcatgtgagccgtgaaggggtgtgcagccccgccgggagggggtaaggcatttgttccatgaaaacctgagtcacccccccaaccccctcccatccctcccctccaccctcttccatccctccctctaccccctcccatccccccccatcgccacccaccaaggaaaactgagccgtggtgggagggggcggggagaggcgctcctcggcagagaggatgagaggcagacaccatggccttcccccagcttgggggtagggttaggggttgtcagaggcgccagtgcagtgtatgcctttcatgaagggagaggaagttccagccttagctaaatgggagggaggggggagagtagggggagtcctcctcaggtccctagaaacacgtctggcaaggactgtgtgcaccgttccagaaaagtctggttaggccagttctcctgagcccaggagtgatggaggtttccggagtcacccagccatctcagtccctggccgccccctccaaggggcatcctggcccctggctggatagaggcagctgctcccccagggcggagggacatccgtcctagtttgggaacagacaagggcttgtgcacgtccccggggactgctgcccctcccagatagccacacagaggccccttgttcccttgctggacgcagccccgggcatcttgatgccctctgcacgctgcagccagtcccaggcaggcttgggcccaggctgcggctggatcagacacagctgatgggccggaaacagcccatgctctgattggctcattttcaatccaagggcactgagcaatttgcctattggcccgggctttccatcttctgcctctgattggtccagttgggggcgctctacggccagccctaccgatggggtcctttataggcgacgggagctcaggctttctgaggatagagttaatgctatgtggacgtccctagggggagtttgaaccgcagcctgacctctgggtcaccccgaccagacacccccaggctgccctggcctgctgggcccctcctggggttcataagtgagaatcaaggtccctttccaggcctggggagcacgctgtgcagtgcagccgccccctctgctgctcaccaagagatttgctgtggcttcctggataaataagaaatgtgtttaggccgggcgcagtggctcatgcctgtaatcccagcactctgggaagccgaggcgggcctatcacctgagatcatgagttcaagaccagcctggccaacatggtaaaacccccctctactcaaaaaaaaaaaaaaaaaaaaaaaattagccgggcatggtggtgtgcgcctgtgatcccagctacttgggagactgaagcaggagaatcgcttgaacccgggaggcagaggttgcagtgagccaagatcgcagccattgcactccagcctgggtgacagagcgagactgtctcaaaacaaaacaaaacaaaacaaaacaaaatgaaatgtgttcagcccttgcaccccagggactaactaagcagtctgtctttttccctgagaggaagactgggggtgctgcactctcaccttctgcagcccggggaggctaaggcattcacagagggagaagcagctctcctagagaaggggaaactgaggcccacattctatccaagactcatcttaaccactaggactttactgaggcaagcacttgggcggttgacgcctcccagaaagaggaagcagggcactgaggttggagctggcagaagagtcaccccctaggtggatggcgtggcctagcccatgtcccctccctgtgtaaggttaccaggttttgagaaggacacagagcctgtctcccggtcaccttcaccaagtctgccctgactccctctcagaagctcagaaagaggccactgggctcacatagaatgtccaggcctgaaatggaacaggagggacaagtgatggggtttggaaggaagggaagagagatagactcagacgactgtttgtctggagattaggagaggggaaggatggaggaagcctcagtggcttccaaggtcctctccacccactcccagttccagaaaggcaggccctgtggttacagttccccctggtcacccatggagcccgtggtagccaccctaccttttggtttctctgtggttgtcaggaccccctaccctgccattctctaccaagcagccagggggagcttttaaacttgtaactccatgtcactccccaactccaaattcttccatggctccctatagcccaagtaggatggcccctgccgatgaagcctcctcccactcttcccccagggccattccactccaaccacactaaacctcctccatgctacccctacccctacctccaagcctttacccctgctgttcttcttggggcacactctttttctcaaaaaaaaaattttttttttttgagacagagtctcactctgttgcccaggctagagtgcagtggtgtgatctcggctcaccacaacctctgcctcctgagttcaagcgattctcctgcctcagcctcctgagtagctgggattataggtgcctaccaccacacctggctaatttttgtatttttagtagagatggggtttcaccatgttggccaggctggtctggaactcctgacttcaggtgattcacctgcctaagcctaggaaagtgctgggattacaggcgtgagccaccacgcctggcctttcctcaaatctttgaatgactgtctccccatctttcagaaaggcaggccctgtggttacagttccccctggtcacccatggagcccgtggtagccaccctaccttatagaaagtgacctttctatttaaaggtcacttcctcagaggggactcccctgacccccagtctacaatagcagccatctccaagccttttctaatcacagaatctcgttttattatctgcacagcgcttgccactatgggaaactatcatgatatctttccttttctgtctggcttccacctagacagtcaatgcctaaggccagggagcaagtcagttatcagcccctacagggatgcctggcacaaataaaacactcagaaaacgtgtggaatgggcaaatgaatgaatgaatgaatgaaccaatgaacaaaggagaccctagtgggttcccaagggtggaaactcctaagctcagcccagacccaaacagcaacaaaggagcctggagacacctctggtccgcgggcagcgcccccatcgcccaccatcaaccaggcaaagcccagcgtgtctccatggagatggcagcaggacccgaccccgtgctggcccgcactctcggcctccttatctggtttaggaatgcgcggtatccacgctcgctcgcgcgggagccacgcctcctctcccccccgcccccgagaccgccacacgcgcggggcccccacgtctccaagcggcactggaaggattcctctccgtcccgccaggggtcccgcctcgagattctgggaagactgggggtgggggaccagatcgcagcagcagctgcaccgcgagttccgcgcctggccgtgtcgccccacgagggggactgtgggctcagcgcgtggggcccggagcatctgacaaggacagagacagaggagggggtggaaatccccgggtgagtcaacccgtgcctgagaagggggcgagttccgacgctccgcccggctcggggccacgcgaggtccgcgccacgcgcgccttcacccacgacccatccctgagccggagttgaaagaggaggcgtctgagccacgcagtcactttctctttccttacaaaacaaagccacgccccccgccgggggaccggaggaggcaaacaacttggggaaaccgaggcagaaagcccgacgtccgaccgccctccccgtgggtgccgccccttggcttggaggctccacggcgcgcacatccttttgccctcgctcagccggagtcagccaggaggggtgttgcccccccccaaacacactccccaagaccccggtccccgagcacggcgtcctgcctcccaaagactccagtcgaaagcgctcggattcagccttctccccggcgccaacttcctgccgctgagaaaggcggggagcacagtctgcgggttcgcggccgaggcagtgggggccgcccggattcttggagagggcgcactgtgaccacccgctccgtgcagcaggaacccaggcggcgcgtgcgcgccccagccccccgattggggcccctcagctcggatcccgagacctcaggggaccaggcccgccttttctgcctccttgtcgccacgcgcgctcacctggctaggccggcccggctcccggccctggccggaggggccttggcgtctgcgtccccagggcggccgcggctggggctggggttgccagccgggctcggctaagtcccggggctgggacgagggacagaggggggggcggagagccgccgcctctgccccccgctcgccccgccctcctctcctcccctttccggcggcggctgcaatgaattccagatgtgaccggccggctggccggggcgcacgcgggggccgacaggagctgcacggagggccctttgtccgccccccccacccgatctctcactctgcccctcccagcccccacccgtgagaaccggccggcgcgaaacgtcacgcagcctggtgacgtcacagtactcctggccaggtggcctcaacctgaaacaactgtcttcaaccccaggttacctctgggcttacccctgggaccctggacttggaagaaaacacgaggtcacatttattgactcaacaaagagccttggaagtacctactaggtgtcaacgcagcaaataggcattaagtgcctactgtgtgtccacccaacaaataaattcctactaagtgcgatgtcctgtcccaaagacaaaattgatctctttttttttttctttttttgagacatggtcttgctctgtcatccaggccagagtgtggtggctcaatcatagctcacgggagcctcagcctcctgcctcagcctccagagtagctgggactacaggtgcgccatcatgcctggctaattttttgcagttttttgtagagatggggtctcgctgtgttgcccaggctggtcttgaactgctgcattcaagcaatcctactgcctcagcctcccaaagtgctggaatgacaggcgtgagccactgtgcctgaccagtctctcccttgataggacctccagaattcaggtgctgccctgtttcccttgggggactggggacactccacactctttcctgcctctgtagatcactgtcccctctggcggggcccagtttgtgcctgccttccagcgtcgggcccagtcttctatccagatttccaattttcactaattcctgggcatttctgtgtgcctgcctgcggaaatgatggacactacaccttcatcgaatgatgtgtgtgtgtgtgtgtgtgtgtgtgtgtgtgtgtgtgtgtgtaaccagcagttcgacaacaggataggaaagcccctcattccagcaacaaaatttttttgtttgagacagagtcttcctttatctcccaggctggggtgcagtggtgccatctcagctcactgcaacctctgcctcccaggttcaagctattcctgtgcctcagcttcacaagtagctggaaatacaggcgcgtgccaccacgcctggctgatttttttgtatttttagtaaagacagggtttcaccatgttggccaggctggtctcgaactcgtgacctcaagtgatccgcctgcctcggcctccccaagtgctgggattacaaatgtaaaccacagcacctggcaacaaatattttttatgcacctactgggcacagcagtgaacaacaacaacagcaacaaaaaggaaaaactccttgaccagatggatttttttttttttttgagacagagtctagctctgtcgccaggctggaatgtagtggcactatctcggctcactgcaacctctgcctcccgggttcaagcgattcttctgcctcagcctcctgagtagctgggattacaggcatgcgccaccatgcccagctaatttttgtagttttagtagagatggaggtttcaccatgttggccaggatggtttcgatctcctgacctcatgatctgcccgccttggcctcccaaagtgctgggattacaggcatgaacaaccgtgcctggccaacccagtggatcttatgttcaggtgggaaatatggctttttatgagggtaccatttgtgaaaatgtagacattatatgttataaacataatctggccaggcacggtggctcacgactgtaatcccaacagtttgggaagccaaggtgggtggattgcttgaccctaggagttctagattagcctgggcaacatggtgtaactccatctctacaaaaaatataaaaattggctgggcatggtggctcacgcctgtaatcccagcactctaggactccaaggtgggtggatcacttgaggtcaggagttcgagaccagtctggccaatatggcaaaaccctttctttactaaaaatacaaaaaattagccgggcgtggtggcgggcgcctgtaatcccagctactcgggaggctgagttaggagaatcgcttgaacccggggaggcgggcgttgcagtgagccaacatggtgctattggacttcagcctgggcaacagagcaagactccgtctcaaaaaataaaataaaaataaagaggctgggtgcaatggctcacacctgtaaccccagcactttgggaggcaaaggcaggtggatcacctgaggtcaggagttcaagaccaggctggccaacatggcgaaccccatctgtactaaaagtacaaaaattagccgggaatggtagtgtgtgcctggagtcccagctactcgggaggctaaggcaggagaattgcttgaaccctggaggtagaggttccagtgagccgagatcatgccattgcactccagcctgggtgacacagcaatactccattttaaataaataaataaataaaactaaataaataaatggagtagtcttgtgtgtactgatgggaaatggtcttcaacatattaagttgaaaaagtacagtgtagaccagtatgcattgcatttctgggtgtatttataagaactatataaatacacacacatttgcctgtgacacacagtctgtctctgggagaaggcaccagaccctagtcacaacagttactcttagggagaggaaccagggggcagggaaacgaggtaagaagaaacagcttttcatggtataccctggagggctgtttgaaatcttttttttttttttttttttttttttgagacgaggtatctccatattggccaggctggtctcgaattcctgacctcaggtgatccgcctgcctcagcctcccaaagtgctgggattacaggcataagccactgcgcccagcctgctgtttgaaatctttagcttctattaccaattcaaaaaaatgtacaaagaggtcgaggcaaggggatcacctgaattcagcagttcgagactagcctgaccaatatggtgaaaccccatctctattaaaaataccaaaattattgggaggctgaggcaggcagatcacgaggtcaggagttcaagaccagtctggccaacatggtgaaacccggtgtctattaaaaatacaaaaattagctgggcacagtggtgcacacctgtagtcccaactacttgggaggctgaggcagtagaatcacttgaacccaggaggcggaggttgcactgagccgagatcccgccactgcattccagcctgggcaacagagtgagactgcatctcaaaaaaacaaaaaaacaaacaaaaaaaaacacaaaaaactagccaggcgtggtagcaggtgcctgtagtcacagccactctggaggctggggcaggagaactgcttgaacccgggaggtggaggttgcagtgagccaagatcgtgccactgcactccagcctaggcgacagagtgaaactccatctcaaaaaatatattaaaaattttaaaaaattggtcatggatagtggctcatgtctgtaatcccagcactttgagaggccaaggtgggaagaccagttgtgcccaggagcttgagatcagcctgcgcaatatagtgagacttcgtctctacaaaagaaaaaacaaaaaattaaacattagccaagcatggttgtgtgtgcctgtagttccagctactcatgaggctggggtgggaggatcacttgagcctgagaggtggaggttgaagttagctgaaatcacactgctgcactccagcctagttgacagagcaagacactgtctggaaaaaaaaaaaatcaacaggccaagcacgataactcacaactgtaatcctagcactttgggaggcagaggcgggaggattgcttgaggccaggaatctgagaccagcccaggcaatatagtaagagcccatctcaaaaaaaaaaaaaaaatcaacacgttaatgctacatataggcatgcaatatatgtgtgtatgtaacacaacatgtaatgctctgtgctaagcctggtgatgcctaattggttgctgccatccaaagctgacagtctgatggaggagacagagaagaaaccagacaattatttttatttatttatttatttatttatttattttgagacagagtctcgctctgtcgccaaggctggagtgcactggcaagatctcggctcgctgcaacctccacctcccaggttcaagcaattctcctgcctcagcctcccaagtatctgggattacaggcgcacaccaccacacccggctaatttttgtattttcagtagagatggggtttcaccatgttggccaggctggtcttgaactcctgacttcaggcgatccacctgcctcagcctcccaaagtgctgggattataggcgtgagccaccgtgcccggccgaaaccagacaattctaacacagggtgatggggctttgaaggggggatacaaagaaagtcagaaagtgactagtcaattctacactttgccccttttcctgagctcgatttcagggtctgctgggttctgggccagatcttggggcgcacttggaccttggcaaaacctcactgcctcttctaccaagtgagaagtgttgcctggacactctagaaaccaggtgtttaatccgcagaggaggaagcacgaagaaaattaggttttctcctcgtctgagagctatcagagcggaaatctcagtcttgtgtggggacctgaaggctggggaggaagtgaccgccctcatatgcctgggctggctcagcaatttgcagtctctcctgggacctggggggttggggcagaggggtgatgtcaaggctgcagacatatgtggccgtctgccaggggaaccgtggctcccagacaaaggtgatgtccccggggacacacagacacaccgacatgcaacttccgcctccctcccacttctgaggcaacacaatgtcttcgccaggtcagccaagggagcgctacagaggactggaaaacgctggaggcctggacttcctgatggtcttggtgggggtcaggaggagagcttggcctaccccggtggcggggggcggggggctgagtgagagaacagtggaggaggaaggaaacagggcccttttcttggagaactcccagcaggggaaatagaggagaaggaagaggcttgaactagcttccactaattatagggtcagtgacaataatggctaacactcacagccaccgactgtgtgctagatgtggcgctgtgagtcctcacaacccgaggaagtgggtattatgataatcatcatcttttttttttttttttttgagatggagtctcgctctgtcactcaggctggagggcagtggcgcgatctcagctcactgcaacctccgccttccaggttcaagggattcccctgcctcagcctcccgagtagctgggattacaggcgcccgccaccacacctgggtaattttttgtatttttagtagaaacggggtttcactgtgttagccaggctggtctagaactcctgacctaagctgatctgcccacctcggcctcccaaagtgctgggattacaggcgtgagccaccgtgcctggccttttttttttttttttttttttgagatggagtctcgttctgtctcccaggctggagtggcagtggcatgatcttggctcactgcaacctccgcctcctgggttcaagcgattctcctgcctcagcctcccaagtagctgggattataggcccgcgccaccatgcctggctaatctttatatttttagtggagacagggcttcaccatgttggccaggctgatctcaaactcctgacctgaagtaatccattccatgtaccttggtcttggcctcccaaagtggctcacactcttacaggtgtgagccactgtgcccggccaatcccattttaaagaagaggaaaattgaccaggcgcggtggctcacgcctgtaatcccagcactttgggagatcaaggtaggcggatcacctgagatcaggagttagagaccagtctggccgacatggcgaaaccccatctctactaaaaagataaaaattagccaggtatggtgatgcgcacctgtaaccccagctactcgagaggctgaggcacaagaattgcttgcacccgggaggcggaggttgcagtgagccaagatcatgccattgcactccagcctaggtgacagagcgagactctatctcaaaaaaaaaaaaaaaaaaaaaaagaaggaggaaaattgaggcatacaggagaggtgagattcgaactagagccatccggctcctctcaatccagcagccctggctgtctgtcttcttattcattcggagtctccaccccattcctgtgccaccacccccatctctgccccagcaggtaggaacagacaggcagtggttaccagccaggactacattggtcaacagtgagatgtggaatgttctccataatccaggagaagggacgccctctgacccccattcctaccttcaccccggatattgtgaactcccccaaatccaggaggcccaggcccttcacaccagatcctgtggttgcccaccatggccctgaaatccatgagacgcaggcctgttctccatcctccctgggcctccactgtccccccacccccctggctctcgtctctggcaggaggaactgcctgggaagtgtctgagatggatcccaactttctcatcatcgccccagcgctgggggaaggggccccaggctacagagaagcttcccagatgctgatcttggcaggcatcagggaactgcggcagcctcatctcctccatgggctcagggcccactttcagcttcagtgacggggtggggaggctcccactggaggccagcctctgccacatctgcaccagaagcagtcttggcccttcgagctggggaaggggtgggctctcttcccgccaaaagcaggatgaacaattaggggaaaggggaacctcaaaaaggctaacttctcagcaagcccctcccaccccagcatgctcatgacagctgacatgtgtataacgtgccagttactgccctaagtgttttacaaatattgactcactctcaatagctcacagcagctccctcagctagagaaaggagagataaactgcagtccatcctcacaatggaagaccatgcctgtaatctcagcactttgggaggctgaggcgggcggatcgcctgaggtcaggagttcgagactagcctggacaacatggcgaaaccccatctctactaaaaacgaaaaaattagctgagtttggtggtacgcacctgtaatcccagctactcaggaggctgaggcaggagaattgcttgaacccaggaggtggaggttgcagtgagccgagattgcaccattgcactccagactaggtgacaagaacaaatgaaactccatctcaaaaaaaaaaaaaatcaaaaagaaggaattggtgatacctagccacatggagaactctcaaatgtattaggatgagggaaagaagttcaacgcaaaggttgcatattgtatgactctatttctataatgttctaggagaaaaaaaactatagggacggtgaaatattgggacaggagaggttgactgcaaaagggcacggtgggaccgggtacagtggctcacccctgtaatcccagcactttcagaggctgaggtgagagaattgctggaacccaggagttcgacaccatcctgagcgacagagcgagacccagtctctacaaaaaaaaaaaaaaaaaaatgagtcaggtacagtggcacgtgcctgtactagctattccggaggctgaggcaggaggattgcctgagcccagcagtttgacaccactgtcacctatgatcgcaccactgcactccagcctgagcaacagagtaagaccaatgtcttaaaaaaaaaaaaaaagttggggggcatggggggaatttttttttttttggcgatggaaccattctgcatcttgattgtggttttggttacgtgactatatatgtttcttgaaatgtgaacaactgtatgcaaaaaagggaagattttctttcttttgagacagagtcttgctctgtcgcccaggctagtatgcagtggcgcgatccactgcaacctctgcctcctgggttcaagcgattctcctgcctcaccttacaggtgtccaccaccacgcctggctaatttttgtatttttagtagagatggggtgttaccatcttggccaggctggtctcgaactcctgaccttgtgattcacccgcctcggcctcctaaagtgctgggattacaggcgtgagccaccacgcccggccaggaagatttttattgtatctaaattgtgcaaaaaaagcaatacttttgtttaaaaaattctcacagcagccttattatttgtgtgtttgtttatttgttttcttgatcttagccaaaaggccgagaagcgatttatttatttttattttttatctttttttttttttttttcgagacggaatctggctctgtcgcccaggctggagtgcagtggcgcaatcttggctcactgcaagctccgcctcccaggttcacgccattctcctacctcagcctcccgagtagctgggactacaggcacccgccagtacgccgggctaattttttgtatttttagtagagacggggtttcaccgtgttagccaggatggtcttgatctcctgacctcgtgatccacccgcctcggcctcccaaagtgctgggataacaggcgtgagccaccgtgcccggcctagtttttatctttttagagataaggtcttgctctgtcacccaggctggagtgcagtggcgcaatcatagctcactgtagtctcaagctggtgagttcaagcaatctgcctacttcagcctacccagtagctgggactacaggcccaagacaccaagcccagctaacttttacattttttgtagagggttaggttggtctcactatgttgcccaggctggacctgaactcctgggctcaagcgatcctcccaccttggtctcccaagggcactgagattacaagagtgaaccactctgcctggcctccggacagtagctttacatcagtgagggtctaatcaggaaaacagaagtatctccaatagaggggatttaatatatgggtcaatttaatacgtagataaaaaatcaaacgatggccaggcgcggtgtctcatgcctgtaatcccagcactttgggaggctaaggtggacaaatcacgaggtcaggagttcgagaccagcctggccaacatggtgaaacccggtctctactaaaaatacaaaaaattagctgggcatagtggcaggagcctgtaatcccagctacttgggaggctgaggcaggagaatcgcttgaacccgggaggcggaggttgcagtgagcggagattgcaccactgcactccagcctgggtgaaagagtaagactttgtctaaaacaaaacaaaacaaaacaaaatggatggagagattattttaaaattagcataggccgggcacagtggctcatgcctgtaatcccagcactttggaaggccgaggcgggcggatcacctgaggtcgggaattcgagaccaggctgaccaacatggagaaaccgtgtctctactaaaaatacaaaattagcctgatgtggctgggcgcagtggctcatgcctgtaatcccagcactctgggaggccaaggcaggtggatcatgaggtcaggagatcgagaccatcctggctaacacggtgaaacccgtcactactaaaaatacaaagaattagccgggcgtggtggcaggcacctgtagtcccagctactcggaaggctgaggcaggagaatggcgtgaacccgggaggcggagcttgcagtgagccgagatcacaccactgcactccagcctgggcgacagagtgagactccgtctcaaaaaaaaaaaaaaaaaaaaagtagccgggcatgctggcacatgcctgtgatcccagctactagggaggctgaggcaggagaatcgcttgaacccaggaggcggaggctgcggtgagccgagatcgcaccattgcactctagcctgggcaataagagcgaaactccatctcaaaaaaaaaaaaaaaaattagcataaaccaagcatggtggtgtaggcctgtagtcccagccactcgggaggctgaggcaggaggatcacttgagcccaggagttggactccggcctgggcaacatagccaaacctcatctcttaaaaaatataataaaaataaaggatatggcagaccatgtaaaaaatttaaatagaaattaccatataggaagatgatatctaatgggaggtgctaccagaggcatatggggagaaatatcttgggctgggtgcagtggttcatgactgtaatcccagcactttgagaggccaaggtgggaggatcacttgaagccaggggtttgagaccagcctgggtaatataggagacccccatctctattttaaaaatctttaaaaaaaaaatccatgtatggttgcacgcacctgtggttccagctactcaggaggttgaggcagaaggatcacgtcagcccaggaggtcgaggctgcagtgagctatgattgtgccactgcactacagcctgggtgacagagtaagaccctatccctagaaaaaaagcaaaaagaggccgggtgcggtgactcacgcttgtaatcccagcactttgggcggctgaggcaggtgaatcacctgaggtcaggagttcaagaccagtctgaccaacatggtgaaaccccgtctctactaaaaataccaaattagccgggcatggtggtgcgtgcctgtaatcccagctacttgggaggctgaggcgggagaatcacttgaacccaggaggtggaggttgcagtgagctgagatcgtgccattgcactccagcctgggcgacaagagcgaaactccgtctcaaaaaagaaaagaagagaaaagaaatatcttggcttctcctaccttcctctcggaaaatctgcccccagtgcctcccattggctaaatgtggccagaagccagttggcaggggagatgtcccgtgcagaggtcagccccgagccatgcagggagaacagcacagggactagatgatgccagggctcgcaggcttaagccctgcaagaaccatgtgggtaggggcaactatacccccattttacagaggaggaaactgaggcctggagagccaatgtgacatgcccagggtctcaggccctcaaggaggttggactctctggttctcgccaacacctgcctggagggctagttctgtggctttttttctacccttcacgcctgtcctggttgctcagggaactgtagggaatgaaaatatccatgcaaatcagccccactgcggggaggccctccgtgggaggctttgccccctcacggagcttggcagttacacacaagctgagctgaaaacaaacaaacagcagatgtttggacagttgatgggggaggggcgctttaggcagctctccctagtataggagaccacccctcaccccccaccaacagatctgtgtcatccatccatgccctgtactttttttttttttttttttgagatggagtcttgctctgtcacccaggctgaagtgcagtggcgcaatcttggctcactgcaacctctgcctcccgggctcaagcaattctcgtcactcagcctcctgagtagctggaattacaggcgcccgccaccatgccgggctaatttttgtatttttagtagagacggggtttcatcatgttggtcaggttggtctcaaactcctgaccttaaatgatccaccctcctcggcttcccaaagtgctgattacaggcgtgagccattacacccagccaatcccattttaaagatgaagaaaattgactgggtgaggtggctcaagcctgtaatccctacattttgggaggctgagttgggcggatcactttagccaccgacctcatgctctgtaccttctttttggggggctgccccccagtattgcaggcctgacccctggcctttgtgagaacccttgttcagtaatggaggaaaagctgaggccagatgttgaggggccttcccgcatctgatatgtgccccctaaattggtgtgatacccacagccagcaaagaccctctctggattacagggttgatgctggtcccacactaccaaggacagaggtcacctgcaattgagcctttgatccacaggagagggctggttgcattggcctttgacctctccccaggcttggctcaaaatggtcaaactttgagccttttggtgtgaaggtcccctggtcgttactgcccttttattaagactcataactgggggccggacgcggtggctcacgcttgtaatcccagcactttgggaggccaaggcgggcagatcacttgaggccaggtgtttgagaccagcctggacaacatggtgaaaccgtgtctctactaaaaatacaaaaaggcagggtgcagtggctcacgcctgtaatctcagcactttgggaggctgaggcaggcggatcacgaggtcaagagatcgataccatcctggccaacatggtgaaacctcgtctctactaaaaatacgaaaattagctgggcgtggtggcgtgtgtctgtagtcccagctgctcaggagactgaggtaggagaatcacttgaacccaggaggcggaggttgcagtgagcagagatcatgccattgcactccagcctggacaacaagagtgaaactccgtctcaaaaaaaaaaaaaaagactcataatcaatatgccagttggggaatgctgtgtaaactggggtagggaccaggtgcagtggctcatgcctgtaattccagcactttgggaagccgaggctggaggacagcttgaggccaggaatttgagaccagcctggccagcacagtgggtctctgtctctaccaaaaataaaacaagtcagcccagtgtggtggcatgtgcctgtagtcccagctactcaggaggctgagtgtgaggatggcttgagcccaggaggtaaagcttgcaatgacctatgatcctgccactgcactccagcctgggcgacagacggagactctgcctctaaaagataaaaaataaaagctggagtaggaagggaaggataagtttagatgcattgtcacctaagaaggtggcatttcagtaaagagccaaaggagatgaaagagtgagacatacagatattcaggggaggctgggcatggtgtctgaagcttgtaatcccagaattttgagaggctaaagtggtgaatcactagaggccaggagttggagaccagcctgggcagcatagtgagactccatcatgttttgttttgttttgttttgttttgttctgttttatttgagacagtgtctcactgtcacccaggctggaatgcagtggcataatcacagctcactacaacctccgcctcccaggttcaaacaattctcctgcctcagcctcccaagtagctgggattataggcgcctgccaccacacctggctaatttttgtatttttagagagacaaggtttcaccacgttggccaggctggcctcgaactcctgacctcaagtcatctgcccacctcggcctctctaagtgctgggattacaggtgtgagccaccacgcctggccctcagcatgttttttaaaagaataaaataataaaagaaacaaaaatagatattaacggggaaatggaatgtgattggtgggttctgggttctggtgaggaggccagggcggctaaagccatggaggaaggggaacaggagaatggaaggttagggcaggtcctgcggggacttgagggttgcatgaggactttggttttagtgctaagtgaaatgaaggcactgagggttctaagcagaagagggaagtgacctgactcagatgtttacagcctacctctaggggatgggtaacagatgatgaggagtgagggtggaaggaagaattcattctcaacacagccccgtaggggagggtttgtgtgtatttcacttacagattaggaggccacagctcccacttgcccaaggccatccagccaattagtggcagtgcctggattcaaaccagtgttactgaatgaataatcatgtatgggcaccttacgtgcccagtgacctcaggtggacagagatttgagacccagggacatagggagaaagtcctctgttgttagcaatacccctgcaacaggatgaacaaaggaattcactcaggaaacatttattagctgggtgtggtggtgcatgcctgtggtcccagctactcgggaggctgaggcaggaggattacttgagcccgggagttgcaggctgcagtgaactatgatcatgccactgcactccagcctaagtgacagagtgagactctgtctctaaaaagaaaaacaaaagaactaaagaaacatttattgagcatgtactgtggtccagacactatgctgagtgctgaagctacagcaggtaataggatagaggaaaattccagccttgggtgagtttacattctaatgggagaggcagacaaaaagcatttttagccaggtgcagtggctcacgcctgtaatcccagcactttgggaggccgaggtgggcagatcacaaggtcaggagtttgagaccagcctggccaacatggtgaaaccccatctctattcaaaatacaaaaaaattagccgagtgtggtggcaggcgcctgtaatcccagctacttgggaggctaaggcaggagaatcgcttgaacctgggagatggaggttgcagtaagctgagactgtgccattgcactctagcctgggcaacaagagcaaaactctgtctcaaaaaaaaaaaaaaaagaagaagaagaagataaccattaggccagatgtggtggctaacatctgtaatcccagcactttgggaggctaaggcaggagaactgctggagccgaggagtctaagactagcctgggcaatgtggtgagacctcgtgtctacaaatatatatatatttttaaatagccaggtgtggtagcacacacgtgtagtcccagctactcaaaagaccaaggtgggaggatcacttgagccccagagacagaggttgcagtgaaccaagatctcgacattgcactccagcctgggtggcagagtggaacactgtctcaaaaaaaagaagataaatattaatatagggcaagagaagagggtcagaaaggtcagaggtgaagatttgcttttttatttttttgagacaaagtctcgatctgtcacctgggctggagtgcagtggcgcaatctcagctcactgcaacctccgcctcccgggttcaagtgatcctcccatcttagcctcctgagaagctgggactacagtcgcacaccagcacagaggtttcagtgagctgaaatcacaccactgcactccagcctgggtgacagagtgagaccctgtctcaaacaacaacaacaaaaacaaaggaagcatgcagtgggtagtccgaaaggttcagccacctctgccccctgtcagtctttcctcactcctggcctctgcgactgctgttctctcaacctgaaacagactttctcctctggacaaagtcctcaagccttagctctcaggctacagcttcataagaccaccccaagaccctgcccccgtggttgggaattcctcctgtggacgcccacagaccctgtagactcccctcctgaactctgatccttcaggcctctgcattggactgtgaatatttcaaaagtgtttgctggatttactggtgtaccagtggtgcacagtaggtgcctaataaatcactaagaaactaagccaggcggcctagtgtggtggctcacgcctgtaatcccagcactttgggaggctgaggcaggcggatcatttgaggtcaggagttcgagaccagcctggccaatatggcaaaaccccatctctactaaaaatacaaaaattagctgggcgtggtggtgtctgcctgtaatcccagctactcaggaggttgaggcaggagaattacttgaacccaggaggtggaggaggttacagtgagccgggatcgcaccactgcattctagcctgggtgacagaatgagactgtgtctcaaaaaaaaaaaaaaaaaacaaaaggcacagggcatggatggatgatacagatctgttgtgggggatgaggggtggaatcacaaggtcaggagtttgagaccatcctggctaacatggtgaaaccgtctctactaaaaatacaaaaattagccaggcgtggtggcgggcacctgtagtcccagctactcaggaggctgaggtgggagaatggcgtgaacctgggaggcggagcttgcagtgagccaagatcacgccactgcactccagcctgggcgacagagcgagactccgtctcaaaaaaaaaaaaaaaaaaaaaaaagccaggcgaggtgactcacacccataatcgcagcactttgggaggccaaggcgggcagatcgcttgagcccagaagtttgagatctgcctgggcaacacggcgagaccctgtctctatgaaacaagaaaaaagaaagaaacgaaatactgttccatcatttgccacataaaatctaaactctctggtgcagaacagacttgcaaatctgcctgtaaaatcatacaccggattttggagtagacacacaggaggctgattgtagtggtggcttctgggagaagaactggggggtagggggcacagataagagtagacagaattttcactctagtaatctttgtaatttttgaaattctctctaccaggtgtatgaatgaccaatgaaaatatacaataggccaggcgcagtggctcacgcctataatcccagcactttgggaggctgaggcgggtggatcacatgaggtcaggagtccgaggccagcctgaccaacatggtgaaaccttgtctctacgaaaaatacaaacattagtcaggtagggagcatcacttgagaacaggagttcaagaccagcctggacaacaaagcaagacctctgcctctacaaaaaaaaaaaaaaaaaaaaaaaattgctgggcatggtggaacatgcctgtggcctcagctacttaggtggctgcagcagaggatcatctgaggccaggaattcaagactacagtgaactataatcgttacactgcactacagactggtaacagggtgagatcctgtctcaaaaacaacagcaacaaaataaacgattaaaagaccttttaaagttgcaaaatacatagagtcttaaacatgcatccacagttatttatttatttatttagaaacggagtttcactcttgttgcccaggctggagtgcaatggtgcggtatcagctcactgcaacctccgcctcccaagttaaaggaattctgcctcagccttccaagtagctggaattacaggcatgcgccaccatgctcggctaattttgtatttttagtaaagatggggttttggcatattggccaggatggtttcgaacccctgacctcaggtgatccacccgcctcggactcccaaagtgctaggattataggcatgagccaccacgcccggccgcattcagttattcttgcagggataaaatacacaatgaaatacactatactttttgttttctttctttcttttttttttttttttttgagacagagtctcactcgtcgcatgggctggagtgcggtgcgggatctcggctcactgcaacctctgcctcctgggttgaagcgattctcctgcgtcagcctcccgagtagctgggattacaggtgcccgccactacgcccagctaatttttttgtatttttagtagagataaggtttcaccatgttggccaggctggtctcgaactcctgactcgtgattcgcccaccttggcctcccaaagtgctgggattacaggcgtgagccaccgcacccggccacatttttttttttttttttttgagacaggatcttagtctgtcacccaggctggagtacagtggcatgaacatggctcactgcagcctcaatctcttgggttcaggtgatccttctgccttagcctccccattagctgggaccacaggcatataccatcacacctagctaatttttaaatttttggtagaggccaggcgcggtggctcacgcctgtaatcccagcactttgggaggccgagtcgggtggatcacctgaggtcgggagttcgagaccagcctggccaaaatggtgaaaccctgtctctactaaaaataaaaaataaaaataaaaattagctgggcgtagtggcgggcgcctgtaatcccagctactcgggaggctgaggcaggagaatcgcttgaacccaggaggcagaggttgcagtgagccaagatcgcgctactgcactccagcctgggcaacagagtgagattctgtctcaaaaaaaaaataataataatgctatttattgactttacaccttgtaccaggcatgggaagctttgcctccattacgtcactgaatctcataacctccttttccagcagaggaaaatgaggttggttcacagaccacgttgtcagctgtgctctgtccagaacgcactggcctccaagtagacagccctggactggtagggaagccggctatgatccggtggcgccccctggaggtctatcgggaacatggtaaagaacctaaaaatgggtgggccacagtagctcatgcctgtaatcccagcactttgggggaccaatgcgggagaattgcttgagcccaggagttcaagaccagcctgggcaacattgggagacccaccccccgccatctctacaaaaaaaaaattaggccgggcgcggtggctcaggcctgtaatcccagcactttgggaggccgaggcgggtggatcacctgaggtcaggagttcaagaccagcctggccaacgtggtgccacactgtctctaataaaaacacgaaaattagggccgggctcggtggctcacgcctgtaatcccagcactttgggaagccgaggcgggcggatcacgaggtcaggagattgagaccatcctggctaacacggtgaaaccccctctctactaaaaatacaaaaagttagccaggtgtggtggcgggcgcctgtagtcccagctactcggtaagctgaggcagggaatcgcttgaacccgggaggccgagatgtgcgatctcacaccactgcactccggcctgggcgacagagcgatactccatctcaaaatacaaatacaaaataaaaaaatacaatacaaaaatgagccgggcttgcgtacctgtagaccagctactcaggagacagaggcaggagaatcccttgagctctggaggtcgaggctgcagtaagccatgatcttgcccattgcactccagcctgggcgacagaggaagaccttgtctctaaaaaccaaaacaaagaaactaaaaataagcattcggatttgttagggggcgacaagggaggcactccaggatctgtggactccccactttgttctgtccttggagagccctggaaggtctgagaggggacgggacctggtttaagggggtaggggagaggaccctggtctagggggtaagggacacaaatacctaatctgaggggtttcggggggacatggccctgccctggggaatctaaactgggaggcatggtctggcaggcccaatcctgaaggctttctgagggcaataaggccctgcctttaaacaaatgaaaaaacgccaggcacggtggctcacgcctgtaatcccagcactttggaaggctgaggcgggaggatcacgaggtcaggagatcgagaccatcctggctaacgcggtgatacccgtctctactaaaaatacaaaaaattagccaggcgtggtggcgggcgcctgcagtcccagctactcgggaggctgaggcaggagaatggcgtgaacccaggaggcggagcttgcagtgagccgagatcgcgccactgcactccagcctgggcaacagagcaagactccgtctcaaaaaaaacaaaaacaaaaacaaaaacaaaaacaaaaaaacaaataaaaaaacaaaaccacataactggataaagaaaaaaccatctccgacagccttggaggcgggatgaaggcgtggcccggtgggcgtgaccaacagcaaaagtttaagcgttattggctgtattccttagttgctcactccagaactgcccacttatgggcgggggtcactccttcaggcttaacagtcattggctgaattgggccagagaggtctcattggctgaattcctgcaccggctcgtcggaggcgggacccaaagtaggctaggcctacggaagctgggtcttcttgctgtgaggtcgcgttccccagtgttacggagggtccttgaggcaggagtgaaaattgggtctgggggttagtcctggggtggaggtctgggcacgccgggtcggaccccctccatcttcggttttgcacaccccgctttccagcgcggagtcgcggcgggtagggcggcgtcgcgtgcgtgacgtcatccagcggcgcctcgcgaggctccagtggccttgacctcccgcggcgtgggaggctgcgcggcgatgctgcagttcgtccgggccggggcgcgggcctggcttcggcctaccggcagccaggtgaggccaggggctggaggcgtggtcgaaggatgaaatttgggggtgtccaggggtcgtctctcactttcgcccaacccttgcagggcctgagttccctggcggaagaggcagcgcgtgcgaccgagaacccggagcaggtggcgagcgagggtaaggcaaccggggtggctccaggaggggcggcgacagagaggtctgacccttgaccctaacctctgacccccgcaatcgctccaggtctcccggagcccgtgctgcgcaaagtcgagctcccggtacccactcatcgacgcccagtgcaggcctgggtcgagtccttgcggggcttcgagcaggagcgcgtgggcctggccgacctgcaccccgatgttttcgccaccgcgcccaggtgagcgagggctgtaatggtgaactgagtggcagagggatgaagagcgggatttcaggagtcacgatgactttgggcttgtacccttgggaaagtgctgtatttctacagcctccgtttctccacctgtcaaaggggaatgatgacagtttcccctgctgtagcgctgtgtgagattgaagcctgagaggtgacatcatctaagggttagggagacagaattctggagcccgactgattaggttcaaatcctgccttcccctcttgtccctcagtgtccctattttgtcagcggtcgggaggttgctgtgatgaataaatgacttaattctggcacataataagttctatagaaatgttgataatctttgttaactggtttttgcaaataagagcactaaaaagactaaaccattcctcggtgcctggaagaggctgtttgcattttagttaccctgctgttcataacatctctaagaaaatgtaggggccaccctgggcgcagtggctcacgcctgtaatcccagcactttgggaggccaaggcgggcggatcacgaggtcaggagatcgagaccatcctggctaacatggtgaaaccccgtctctactaaaaatacaaaaaaaaattagccgggcgtggtggcgggcgtctgtagtcccaggtactctggaggctgaggcaagagaatggcgtgaacccgggaggcggagcttgcagtgagccgagatcgcgccactgcactccatcctgggcaacactctgtctcaaaaaaaaaaaaaaaaaagaaagaaaagaaaatgtaggggccagttactgtggctcacatctgtaatcccagcacattgggaggccgaggtgggcggatcacttgaaaccaggagttgcagaccagcctggccaacatgatgaaaccccgtctctaccaaaaatacaaaaattagccggacgtcttagtgcaagcctgtagtcccagctactcaggaggctgaggcatgagaatcgcttgcacctggggagatggaggttgcagtgagccgtgattatactactgcactccagcctgggcgacagagacagactccatctcaaaaaaaaaaacaggtgaaattgatttcaataatgtatttaacctgtatttaaaactatgtcgaaatcacattgtagcatggggcactggccatgtttcagatgttgagtatgtgactgtatggaatggtatagaactagagaggaaaaccagtccctgaagaaggtggcaataagtgaagtgtaatagcaggaaaaaagtaatggtaggaaaaacaaggaagaaggggtggctttttttttctgagatgaagtttcgctcttgtcgcccaggctggagtgcaatggcatgctctcagctcacttcaacctccgcctcctgggttctactaattctcatgcctcagcctcccgagtagccagaatgacagacatgtaccaccgtgcccagctaatctttgtatattttggagagacatcactttgccatgttgcccaggctggtcttactccttgcctcaagtgatccacctgccttggcctcccaaagtgccaggattccaggcatgagccactgcacctggtcagggtggctctttctttagaaggtacctttcagcagttattggagctgctacctgtaggctgagaaagaaccatccaggagaagagtgtttcaggcagagggaacagcaagtgccaaggccctgaggcagaatttcaagatggggtcagtgaggggcagaggcaaatcgcccagggccctggaggcagaagggagaatcctgggttttcctatagtggggtgggagcgtttgaagcagagttgggcttctcatgtgtccttcctccccgcaggctggacatactgcaccaggttgctatgtggcagaagaacttcaagagaattgtgagtgcctaaatggagcaaggtggtgggaaggagcttcctggggaggttggggataggacccagaggaagcccatcgctgggttttctctggactgctcggctggggcctcatctgtctcctgaactattcaccgatgggtccatttttggttctcttttttttgtttgtttttgagatggagatggagtctcactctgtcacccaggctggagtgcagtggcgcaatcttggttcactgcaacctccgcttcctgggttcaagcgattctcctgcctctgcctcctgagtagctgggattacaggtgtgcaccaccatgcaggctaatttttgtatttttagtagagatggagtttcaccatgttggtcaggctggtctcaaactcctgacctcaaggaacctacctgccttggcctcccaaagtgctgggattacaggcgtgagccaccgtgcccagctcattttcagttgttttctgatcactcactgatgtgggcattgtggtgggtgagaggatatagcagggaccacgaggacaaaacaggcaaggtccggctgtgtgcaagtggctcaggcctgtaatcccagcactggaagctgaggtgggtgggttgcttggggccaggaaagaccagcctgggaaacagcaagacccagtctctaccccttcccccacaaccccaagaaaaagatgggcaaagtccctattctaatgaaggtcacagtgtcatgggaggagaagtgaaggtgagtcagatggtcatacgtaatgtgtaattatgagcatgtcccagagaatgggacgttcaaccttgggtctactgtagaagctaaccagatcaaggaggcagtggggctagtgtggagataacaggaacagggtgtgcaaaggccctgtggcagggaccacaaggaagccagtgttgccacagaggccagtgggagcagtggggaggagtctgggttttgtgccaagaacattgaagaatccattaccagtcagggtcttatccatccaccccagaggtctggccagtcctccccctgctcacaccttccctggctccccatcaccctaggaataaagtcatcagtctgctattctgagttcttcctgatttccttgccctgctcctctttcctgattctccctgtctgtgtcatttcccatggccctccctccttgtggctacaaccacattaaaattgttcaaaaaataggccggcacggtggctcacacctgtaatctcagcactttgggaggccaaggcaggtggatcacttgaggccaggagttccaaaccagcctagtcaacgtggcaaaaccccatctctactgaaaatacaaaaaattagctggggccaggtgcggtggctcacacctgtaatcccagtactttgggaggccgaggcggatggatcacgaggtcgggagatcgagaccagcctgaccaatatggtgaaaccccatctctactaaaaatacaaatattagttgggtgtggcagcgggcgcctgtagtcccagctactctggaggctgagacaggagaattgcttgaacctgggaggcggaggttgcagtgagccgagatcgcgccactgcactccagcgtgggcgacagagcgagactccatctcaaaaaaaaaaattagccgggcatggtgacaggcacccgtaatctcagctactagggaggctgaggcaggagaatcgcttgaatctaggaatcagaggttgcagtgagccaaggtcacaccacttgcactccacagcctgggtgacagagtgagactgcctcaaaaaaaaaaatcaatagttcagaaaataccgagcaccccctgcgtgcccggtggcagggcccctgcctttgtgaggctggcatggggcaggagctgtgacttctttaccctccccctcgctccccaagtactctgtgcttggccagagagagcccgtcatcatggtgcctcctgtctgacttccccgtggcaggactgatctgcccggctccctgacacctgcctcgtggacctgacccccctcctctttgtgcctccagagctatgccaagaccaagacgagagccgaggtgcggggcggtggccggaagccttggccgcagaaaggcactgggcgggcccggcatggcagcatccgctctccgctctggcgaggaggtaacaggacagggtggagggggcggggaggggtgggggggccagggaagggcctgggtgtttactcacacacagctgcgcacatctggcatggtattatgtcagccctgttccctccacctcatggaaccacctgggctggtgacatcggaactgaggcccttggacctcactacccatataaggggacagagatctgggagccatccactcctccctctcgcatgccctgtctcttcagcctgtggccacagcccctcttgaccccacctcctgtcaccctctcctgacccacacttcccacagcacccagagagctcttctaaatcgtggaacctgaactccggacctcggcctttgtgtggaacctgaactcctgaccttgtcattgtgggccctggtggctgcacacctttccccctcatcccctcctttccctctctgaccaggcagagatgactctctcttgttttttcggttgtgtttgtttttaactttttattttcttgaatgctaacaagatgactcagggtggtgccagccaccccatcacctgtttacctggccagctctcctcacctttcagggttctgggccacacctcctccaggaagccccccttgatctcctttccttccacatcccccggagctaccctgatttcttctacagctgagcctcttttctgccctgccggaatgtgaatggcatgagggcagggaccatgtctgttgtcttctctgctgcatttccaaggcccaggcgagggcagacaccaacacatggtgcttgcaggggtctccctgactgttgttgctcccagatcatactgcttgctccaccggagcatgtgcctgatgccttcctctcccgcttgacctgaaagttcgaacctcctgataacttcagcattaacagcgtgcttgagttaagttcacactctagccactctatggaatccacaccataactcatggtgtcctatggggcaggaactgtccgatctcaaggtggtttgttttttttattgtttgcttttgagacaagatctcgctctgttgcccaggctgtagtgcagtggtgcaatcatagctcactgcagccttgagctcctgggctcaagtgatcctccatcctcagcctcccaaaatgctggtgtgagccaccttcgccagccctgtctcagagtgtgacagctgggaaaactgaagcccagtgaagcaaagtcactggtcccatgttgtccctgatccagcctcccctgaggccccaccctctctgccttgttcctggcagcgccccctctctcgtcaccccatgccagccactgcagcagattgctgacctccaggctctgcagtggcccctacctgctcacatgcctctgtccccgcaggaggtgttgcccatggcccccggggccccacaagttactactacatgctgcccatgaaggtgcgggcgctgggtctcaaagtggcactgaccgtcaagctggcccaggtacagccatgggggggcccagacagctgctagaggtggggctgctctggacccagggttcaaaccatcctttccttccaccaggacgacctgcacatcatggactccctagagctgcccaccggagacccacagtacctgacagagctggcgcactaccgccgctggggggactccgtactcctcgtggacttgtgagggcacagggcagagcaggggcagggggccctgagctccgtactctgagggttcaacccccactccctggcctctcttacagaacacacgaggagatgccacagagcatcgtggaggccacctctaggcttaagaccttcaacttgatcccggctgttggtgagcaaagagcccaggcccctagagtgcgcatgtgcaggctccgctgttagaatcacagcggttcaaatccggcatctggtcgctgagtggcctcaggcagtgaccacgctcccggacccaaccttcagcttgcccaaagcaataatctttcctaaagaagtgcttggctggggatggtggctcacgcttgtaatcccagtactttgggaggccaaggcagtctgggcaatatagtgaggctcccatctgtactaaaaataaaaaagttaggcgtggcgatgtgcacctgtagtcccagctactcgggggctgagccaggcggatagcttgagctcagggggccaaggctgcagtgagtcatgatcgcaccactgcacccaaacctggggagagagctagactcttgtctcaaaaaaaaaaaaaaaaaaaaaaaaaaagctccaaagtcacctctgtcaaagccacagtctgttccttccacagccacaagatggcgacatgagcctaagtcaagtcctgtccctcaacccacgcccctcgctggcttccccacctctctcaggatgaaagcccaagtcatcagggtggcacgtcaggccctgcacgatgtgccccgtcacctccctgccctcccgtcatttgccctgggtctcccccaccagaatgggagccaggagtcccagccaggcacaggaccgagcctggctctcggtcagcaggtgatgagctgggagcagctccttggccagaggcttacaggcaacaagcggccaggcagggtctggccccgggctgctgggctcacaaagtcacactagaccacagtgacgatctctgtaagcacaaagggactccgatgtgggtggggtgaggagagaggcagccccggcctgaccggccccccgccccgcccccaccccgcccccaggcctaaatgtgcacagcatgctcaagcaccagacgctggtcctgacgctgcccaccgtcgccttcctggaggacaagctgctctggcaggactcacgttacagacccctctaccccttcagcctgccctacagcgacttcccccgacccctaccccacgctacccagggcccagcggccaccccgtaccactgttgatgtgaagcacctcttctgagccaggccgagcccctggccgacttgggagcctcaggcccacgcccacccttcgaggaaggtgtcacctggaccccttcattccacggaggaagctgaggccacagggagcggccatcgccattgggaaggggcgactccacggaaagcccagacgggcttctgcatccattccctctttttgtttttaaaataaattgtatttttgaatcaaggaggataaagataacttctcagtgtcatttttgataattgcattgagaacgatgagctccttcccaggttctgggcactgttggggatccgccgtctcaagaggctcacggtctggtttaggggaaccccagggctgtttgtggaaattacaagaattcacttacccggtgagtcagactccaggagctcacaggtgcgtgggcgctggcacttcctaggagctgactcctgccacatccctctcctgagcactgctgccagccattctcacccctgagagggtttgcagtcctgtctgcgacagtacttcatgcagcctgagagtgtgtgcttgattgtacaagtagatgttgtgtaaacctgagttttcagagtgacttcctgtaagcacagtcagaaaagtaaatgtctctctgtaagtgagcagataagcacatgcttaaaaacaccagctgggcgtggtgactcgcacctgtaaccctagcactttgggaggtcaaggtggaaggatcgtttgagctcagagcttccagaccagcctgggcaacatggtgaaaccccatctctgcaaaaaatataaaaattaagtgggcgtgttggcgtccacctgtggtcccagctacttgggaggctgaggtgggaggatcacctgagcccaggaagcagaggttgcagtgagctgagactgagccaccacacaccagcctgggtgacagagtgagacactgtcttaaaaccccaatatcccaatttttgagtttgctgaggttgccagccaagttaatttttcttaacagccataacagactataatatagacaatgtgatcgatttatttaaagtcaaccagctgggcgcggtggctcacgcctataatcccagaattttaggaggctgagccaggtggatcaccggaagtcaggagttcgagaccagcctggccaagccgggagtggtggcgggcacctgtaatcccagctacttaggaggctgaggtgggagaatcgcttgaacccaggaggcagaggttgcagtgagccaagatagcgccactgcgctccagcctgggtgacagagcaagattccatctataaataaataaataaataaagtcaatcaggactgccttctgcctgtgtgggcctggccaggctaagcagccacacaaccctccctacctgctgggccacccctggctgaaaacctctctggaatgcctctcttgggattgccttcagagattgcaacacattctccaaacaccctcagtggacatagactttgatccttgaagcagcagatttgactaagtaaaaaagaaaaagctattaaaaccagttggctgggcgcggtggctcacgcctgtaatcccagcactttgggaggccgaggcaggcggatcacgaggtcaggagatcgagactatcctggctaacacagtgaaaccccatctctaccaaaaatacaaaaaattagccgggcgtggtggtgggcgcctgtagtcccagctactcaggagactgaggcaggagaatggtgtgaacccgggaggtggagcttgcagtgagccgagatcgcgccactgcactccactccagcctggcgacagagctagactgtctcaaaaaaaaaaacagaggcgtgccaaagctcagcagaaaatgccgcctcatcactcttcctcttgccagtcttgtgggggcaccaaggcctagagtaacacccagctgttggcctgacagtgcctggcccagcctggagagttgcagccagaagtataaatgtggttcagtctgcgtcatacctgtcaggaaacatggtgagaccaactgctgcccagacggattttcaaaagaaatgggtcagaacgtattcccccacactggaatccctcagccagattgaggataaaaacaggcatcagaaaaaaatgatacaggcaggcctggtggctcatgcctgtaatcccagcactttgggaggctgaggcgggaggatcgcctgagcacaggagtttgagaccagcctgggcaacacagtgagaacctatctctactaaaaatagaacaattagccaggcacggtggtgtggctgtggtcccagctactctggaggctgaggtgggaggatcacttgagccctaggggtagaggctgcagtgagcggagatcaccccactgcaatccagcctgggcaacagatcaagaccctgtctcaaaaaaaaaaaaaagaaaagaaaacaaaagaaaaatatgatacactgactagaatgtgctttaaaataattggcatagttgggtatggtggcatgcacctgcagtctcacctacttggaaagctgtggccaggagtttgagaccagcctgggcaacacagcaagacctcatctctataaaaaataggcggggagcagtggctcacgcctgtaatcccagcactttgggaggccaaggcaggcggatcactagaggacaggagttcaagaccagcctggccaacatggtgaaaccccatctctactaaaaatacaaaaattggcaggatgtggtggcgggtgcctataatcccagctacttgggaggctgaggcaggagaatcgcttgaacctgggaggcagaggttgcagtgagccgaggtcatgacactgccctcaaacctgggtgacagagcaagactcggtctcgaaaaaaaaaataatgaatgaatgaattaattcattaattaaatagggggggtatatgagtttgttagggctgccgtaggagtgccacaaactgcaggggttgggggggttagtcaacagaaatttattctgtcctgtttctggaggctggaagtccaaggtgaagaacagggttagctccttctaagggaaaatctgttccagatccctctcctagcgtctggtggtttgctttgctgactatctttgacattccttggcttgtagccacactgcttcagtctccaccttcatctttacatgatgttgtccctgtgggtatgtgtctgtttctgtgtctaaatttctcctttttatttttttcttttttctctatctttttttttagacggagtcgcgctctgttgcccaggctggagtgcagtggctcgatctcggctcactgcaacttctgcctcctgggttcaagcgattctcctgcctcagcctcccaagtagctgggattacaggcgcccaccaccatgcctggctaatttttgtgtttttagtagagaaggggtttcgccatattggccaggctggtaacctcaggtgatccacccgctttggcctcccaaagtactgggattacaagcgtgagccaccgaacctggcctattttttcatttatttttagacagagttttgctcttcttgtccaggctagagtacaatggcgcaatctcggctaatctcaacctccgcctcccgggttcaggcgattctcctgcctcagcctcccaagtagctgggattacaggcatacgccacaatgcctggctaattctgttttgttagcagagatggggtttcaccatgttggtcaggctggtctcgaactcccgacctcaggtgatccacccacctcagcctcccaaagtgctgagattacagacacgagccactgagcctggccctctcctttttatttttaaaatatattttgtggacggcagcagtggctcacacctgtaatcccagcactttgggaggccgaggcgggtggatcacaaggtcaggaactcgagaccagcctggccaatatggtgaagccccatctctactaaaaatataaaaattagccaggcatggccgggcgcggtggctcacgcctgtaatcccagcactttgggaggccgaggcgggcggatcacgaggtcaggagatcgagaccatcctggttaatacggtgaaaccccgtctctactaaaaatacaaaaaaaaaattagctgggcgaggtggcaggtgcctgtagtcccagctactcgggaggctgaggcatgagaatggcgtgaacccgggaggcggagcttgcagtgagctgagatcgcgccactgcactccagcctgggtgacagagtgagactccatctcaaaaaaaaaaaaaaaaaatttagccaggcgtggtgtcagaagcctgtagtcgcaactacttgggaggctgaggcaggagaatcacttgaacccaggaggtggaggttgcagtgagccgagaccacatcacggcacatctaaaaaaaaaaaaagttttctgtttttgttttttgcaaaactactgaaataaatacagtgagatatttatttataaatgagaacgaattaataatgagccgtaggctgggtgtggtggctcatgcctataatcccagcattttggggggccaaggcaggtggaacacttgaggtcaagagttcgagaccaggctgaccaatatagtggaaccccatctctactaaaaatacaaaagaattagccgggcatggtgccgggcgcctgtaatctcagctatgggaggctgaggtaggagaatcgcttaaaccctggaggcggaggttgcagtgaggcgatatcacgccactgcactccagcctgggggacagagcgagactccatctctaaataaataaataaggagctgtatttcaaaatttggagaaggtgacactgagagtactgaatacacagttttttgtttttttggttttttttgagacagagtctcgctctgtcacccaggctggagtgcagtggtgcaacctcggctcactgcaatctctgcctcccggttcaagcaaatctcctgcctcagcctcccgcgtagctgggattacaggcacgcatccccatgcctggctaatttttgtatttttagtagagacgggatttcaccatattggtcaggctgatctcaaactcctgacctcgtgatctgcctgcctcggcctcccaaagtgctgggattacaggcgtgagccaccgagcctggccccaaaaaatatttatcaaaactatgttaatgctggccgggtgcggtggctcatgcctgtaatcccagcactttgggaggccgaggcaggtggaacacgaggtcaggagattgagaccatcctggctaacacggtgaaaccccgtctctactaaaaaatacaaaaaattagccgggcgcggtggtgggtgcctgtagtcccagctactcaggaggctgaagcaggagaatggcaggaaccggggaggcagaggttgtagtgagctgagatcgcgccattgcactccagcctgggcgacagagcgagaatccgtctcgaaaaaaaaaaaaaaatacacacacacacacaaaaactgtgttaatgcttaactacacaaaaatgataatcagataaatatgcatttatttagagaactgcatgttggtcagtccagtccctgcagagggaattcccagcatgacctcattcacttgtgaagacagagcaatccttgtgttttatttttttaagatggatctcactctgttgcccagactggagtgcagtggcatgatctcagccctctgccacctccaccttccgggttcaagagattctcatgcctcagcctcctgagtagctgagattacaggcttgtgcctccatgcccagctaatttttttatttttactagagatgaggtttcaccagtttgggcaggccggtctcaaactcctgacctcaagtgatccacccacctcggcctcccgaagtgctgggatgacaggtgcctggtcagcaactgttgtttagacatacacattttatctgctcgtccagcatggtcagccctccactttttaaattttattttatttatttttttgagacagagtctcactctgttgtccaggttggagtccagtggcgtgatttcggctcactgcaacctctacttcccaggttcgagcaattctcctgcctcagcttcccgagtagctgggattacaggcccgcgtccccacacctagctaatttttgtatttttagtagagacagggtttcaccatgttggccaggctggtctcgaactcctgacctcaggtgattctcctgccttggcctcccaaagtgctgagattacaggtgtgagccactgcacacggccttaaattttatttattatttatttatttatttatttagagacttagtctcactctgttgcccaggctggagtgcagtggcatggtctcggctcactgcactccacctcctgggttcacgccattctcctgcctcagcctcccgagtagctgggactacaggcgcccaccaccactcccggctaatttttgtatttttagtagagatggggtttcactgtgttagccaggatagtctcgatctcctgacctcgtgatccgcctgcctcggcctcccaaagtgctgggattacttattttgttttttgtagagacaggttctcactgtgttgcccaggctggtcttgaactcctgatctcaagtgatcttcccacctcagtctctcaaagggctgggattacaggggtgagccactgcaccccaccttccctctactttttgacggtttccttctgctatgaatgtgcatgtccagttgtctgcttcttagaactgatatttaccttcctcatccatcagccattggaggaggactgggaccgctcagattattgatctgacccattctttcggcagggtttcctggtggctgtcttccatcaccaaaactggaatcagaagagtttccatagccctttttttttccccacatctttgctgaagcagagttttgaaaaacaaaaccacaaactaagctattccccagaagaaatctgtaatcaaagataagctctgccgggcacagtggctcacgccttttggaggccaaggcgggcggatcacctgaggtcaggagttctagacctgccaggccaacatggtaaaacctcatctctactaaaaatacaaaaattagctagatgtggtggtgggtacctgtagtctcagctacctgggaggctgaggcaagagaatcgcttgaacctgggaagtagaggttgcagtgagccgagattgcaccactgcactccagcctgggcgacggagtgagacgacctcacaaaaatttacataaataaaatgaaaagtaaaataaaaatacaaaagttggccgggtgcgtttgctcacgcctgtaatcccagcactttgggagggtgaggcaggcagataatgaggtaagaagatcgagaccatcctggctaacacggtgaaaccctgtctctactaaaaatacaaaaaattagctgtgcgtggtgacacgcacctgtagtcccagctatttgggaggctgaggcaggagaatcacttgaacctgggaggtggaggttgcagtgagccgagatcgcaccactgcactccagcctgggccacagagtgagactccatcttgaaaaaaaaaaaaaatacaaaagttagccaggggtgttggtgggtgcctgtaatcccagctatttgggaggctaaggcagaagaatttcttgaacctaggaaacggaggttgcagtgagccgagatcacacctctgtactccagcctggacaacagagcgagactttgtctcaaaaaaaaaaaaaaaaaaaaaactaaataggccgggagcagtggctcatgcctataatcccagccctttgggaggccaaggcaggtggatcacttgaggtcaggagtttgagaccaggctggccaacatggtgtaaccccgtctctactaaaaacacaaaaattagccgggtctggtggcgtatgtctgtaatcccagctactcgggaggctgaggcaggagaatcacttaaacctgggaggcaggggttgcagtgagctgagatcgtgccactgcactctagccagggtgacagagtgaaactctgtctcaaaaaattaaaaaagaaattcagcaagtaatgagttaaggaattcgaatattaaggcgagtgacaaggaacgcccaggatgtggcccaggatggagtaggggggacactcatttaggagaaagctcaggccacaagacaggaggagccagccttgttggggttgaagggaagagcattccaggctgagggaactgcaaggcgtttgcatgggacactatgggatggcttctgcccttggtgggcagcctctggtctgaggccattctttggcctgcctgactgtctggcaaccgggaggaagccctgcccttcctggagacagaaacaaaggtctaggaaatatctgcttcccttttccttgaaaaacgcttaagggaacggaggactgggaggtgccgtctctctctgccagcctgccccctaccatagccatcccactcccatctcagaaagtgacccgccatcctccaaaaggctcggaccctgatcaaggagtcatcccccttgtcccagcacctccagttggcccagcctccaaaacggatgtcaaattcagccctttctccaaggacactgcccagtccaggccccactatcattcatctggactagaacagtcacctcctctcccatctcctggctgcagctcttgaagcctcaactgggcccctgtgaacacttgagttagggcaaggtccttcctctgctcagaaccctctatacctcccacctcgctgggcataaaagccaaagtcctggccaggcacggtggctcacatctgttatcccagcactttgggaggccaaggggggcggatcactagaggtcaggagttagagaccaacatggtgaaaccccatctctactaaaaatacaaaaattagctaggcgtggtgacgcacccctgtagtaccagctactcggtaggctgaggtgggagaatcgcttgaacctgggaggcagagtttgcagtgagccgagatcacaccactgtgctccagcctgggtgacagaacgagactggggttcagaaacaaacaaacaaaacaacaaagtcctcctcaggtgacaggaacttgcacctatctgccctgtcatctccctgcccgctcctctcctcgaatctctcctttgctaagcctgctccagccacactgttctcctggctgttcctttttttttttttttttttttttttttgagtctcactctcacccaggctggagtgcagtgcctctatcttggctcactgcaacctccgcctgccgggttcaagagattctcctgcatcagcctcccaagtaggtggaattacaggtgtgcaccaccacacccggctaatttttgtattttgcatagagatgggggtctccctatgttgcccaggctggtcttgaactcctgggctcaagtgatcctcccatctcggcctcccaaaatgctgggattacaggtgggagccgcgcccaggtggatttttgtctgactctgttcattcctgtgtccccagtacctggaaggacgccaagcacacagtaggcgcttaaaaaacattgagccacatgttgagaaaagaacggcaccattgtggctgcaagtgggacttgggccgcgcgggggagctcgcgcacctcgggccggggcaagagctcagtggaacccgcccgaggaagaacccgtggcgcaggattttcccaggccttctgaggaccaggggcgtcccccgtcccaccctgtgactttgctcaggccgttccggggcgggaattcagaactcctcagccccccaagaaaaaaatatccccgtggaaattccttgggaatgaccgaggcgggggaaatatgcgtctctggatggccagtgactcgcagcccccttccccgataggaagggcctgcgcgtccggggacccttcgcttccccttctgctgcgcgacctccctggcccctcggagatctccatggcgacgccgcgcgcgccccacaacaggaaagccttaggcggcgcggcttggtgctcggagacttaagagtacccagcctcgacgtggtggatgtcgagtcttggggtcacacgcacaggcggtggccaagcaaacacccgctcatatttagtgcatgagcctgggttcgagttgccggagcctcgcgcgtagggcaggggttcgagcgccccttctccctgcctcgcctctgcgcctgggggctgctgcctcagtttcccagcgacaggcagggatttcgagcgtccccctcccctccctcgtcaagatccaagctagctgcctcagtttccccgcggagcctgggacgccagcggaggggctcggcgcgtagggatcacgcagcttccttcctttttctgggagctgtaaagacgcctccgcggccaaggccgaaaggggaagcgaggaggccgccggggtgagtgccctcgggtgtagagagaggacgccgatttccccggacgtggtgagaccgcgcttcgtcactcccacggttagcggtcgccgggaggtgcctggctctgctctggccgcttctcgagaaatgcccgtgtcagctaggtgtggacgtgacctagggggaggggcatccctcagtggagggagcccggggaggattcctgggcccccacccaggcagggggctcatccactcgattaaagaggcctgcgtaagctggagagggaggacttgagttcggaccccctcgcagcctggagtctcagtttaccgctttgtgaaatggacacaataacagtctccactctccggggaagttggcagtatttaaaagtacttaataaaccgcttagcgcggtgtagaccgtgattcaagcttagcctggccgggaaacgggaggcgtggaggccgggagcagcccccggggtcatcgccctgccaccgccgcccgattgctttagcttggaaattccggagctgaagcggccagcgagggaggatgaccctctcggcccgggcaccctgtcagtccggaaataactgcagcatttgttccggaggggaaggcgcgaggtttccgggaaagcagcaccgccccttggcccccaggtggctagcgctataaaggatcacgcgccccagtcgacgctgagctcctctgctactcagagttgcaacctcagcctcgctatggctcccagcagcccccggcccgcgctgcccgcactcctggtcctgctcggggctctgttcccaggtgagtcggggtggggattgccgtcgggccagttctccgaagccccgggaggaccggctcccgggtcaggtcatgcatgcttaggtagctgtttatgggaaggaggggctagagacagcgattgaaaggcaacagccagtaggttcgaatccagaccctgcatacctccacgtgtggccttgggctatagattgcagctttaaaaaagggtagggggttggagatggaggggaggggcgggcctcgttttgttgcccaggccggtcttgaactccgggggtctagccttacctcctgcctcagcctcccgagtagctgggatgagaggtgtgaaccaccgccttgcttggctagattgcgtctcttacagtttctcagctgtaaaacgggaaacgttatagcggccacctggcagggtatcttggcccagcgcagcacctggccccaggactcgatcatgatggtttgggaacttggctctgtgccaacccaacaaggcttaagggacccccacccccctcaagatgtatattctgttcctcatcctctctgcccctggggaagtccagggctgcttctacttgggggaattccagagctgacttatccgtggcccaaagctgagaagtgggacgccccagcacaccctcccccagctccagcccagctagggaagagggaaggggtcagagggtctttcatggtggtgtaagtttggggaaccaggagggtgggagattgacagcttggttaacagctcaacaaagcctgagatccaggccagcacggtagttcatgccagtaatcccaacactttaggagccccaggcgggcgaatcacttaaggtcaggagtttgagaccagcctggccaacatggcaacatcccgtctctactaaaaatacaaaaattagctggcatggtggtgggcgcctgtgatcccagctgctcgggaggctgagggaggaaaatcccttaagcccacgaggctgaggttgcagtgaaccaagattgtgccactgcactccagcctgggagacatagcgagattctgtctcaaaaaacaaagcgttctgatccggactcagacccagatcgcactgctttctagctgagtaaccatttctctctatgaaatgggaatggtcccagaatctcccttggagaatgtatggagccagtgtcctcacacccccatccaagatagaacaaatctgagacaggaatctttgagtgaggcagtgctgggctcagacattttttcccaccttcggaggcagcagaatctgagggacctgatccaaataagccccttctttctttcttttcttttcttttttttttttttttttttttgagacggagtctcactctgtcgcccaggctggagtgcagtggcgtgatctcggctcactgcaacctctgcctcccaggttcaaacgattctcctgcctcagcctccctgagtagctgggactacaggcatgtgccatcacacccggctaatcactgtgttagccaggatggtctcgatttcctgacctcatgatctgcccaccctgcctcccaaagtgctgggattacatgcgtgagccacagtgcccaccccgtaagccccttctttcttacctgcaaggtagccagttgctacccatcctgtgctgagttacttgtattagcaagggatggggtggctatactcacccaccttacagatggggaaattgaggcccaaagagggggaaactacgtgtctcagggagtgaggagccagtctgattcctggagggctgactgtctccacctgacttcttaggagggaggagggcaccaacttcacattaaaatctggttggacacagtggctcacacctgtaatcctggcattttgggaggcttaggcgggaggatcacttgaggccaggagtttgagaccagccttagcaacatagtgagaccccatctctacaaaaatgtttttcagggccaggcgcggtggctcacacctataatcccagcactttgggaggctgaggcgggcggattacctgaggtcaggagtttgagaccagcctgaccaacatggagaaaccccgtctctactaaaagtacaaaattacccgggcgtggtggcgcatgcctgtaatcccagctactcgggaggctgaggcaggagaatcgcttgaacctgggaggcggaggttgcggtgaactgagatcgtgccattgcactccagcctgggcaacaagagctaaactccgtctcaaaaaaaaaaaaatgtttttcaaatattagccgggtatggtggtgtcctgtagtcccagctacttgggaggctgagatgggaggatcacttgagcccaggagttcaaggttacagtgagctatgattgtgccactgtattccagcctgggtaacagagggagacccgtttaaaaaaaaaaaagtgatggctaaagtccttccatggctccctattgccctcagtataaagaacacatgtggctgggcgtggtggttcacgcctgtaatcccagcactttgggaggctgaggcgggcggatcacttgaggccaggagtttgagagcaggctggccgacgtggcgaaaccccgtctctattaaaaatacaaaaattagctgggcgtggtggtgcttgcctgtaatcccagatactctggaggctgaggcaggagaatcacttgaacccgggaggcaaaggttgcagtgagctgagattgcgccactgcactccagtctgagtgacaaagcgagactccatctcaaaaaaaaaaaaaataaaagaacacatctttagcatggccttcagtgctcacgggatcttcctgaattaatctccccctcttcatccttgctcactcagctccagccaccctgccccgggacatctgtacttgcctggaacttatttcccttttctccggacagccagccctttctcgtcatttagatctctgctgaaacattaccctgtcaccaaagcactgtctattctatcaccctgttttgtttttgtcaaagctcatattaacatcagttattaattatcttgtttgctcataatttttttttttttttttttggagacagagtctcgttctgttgctcaggctggagtgcagtggcacaatcttggctcactgtaacctccacctcccaggttcaagtgattcttgtgcctcagcctcccaaatagctaggactacaggcacgtcccaccatgcccagctaatttttgtatttttagtggagacggggctttgtcatgttggccaggctgatctcaaattcctgacctcaagtgatctgcccgccttggcctcccaaagtgctgggattacaggcgtgagccaccacacccggcctgctcatgaattttctctttaacttccacatcgaaggcaaagtattgtcttgttaaggctgtgcctccagcacccagcacaggctgggcgcacattcccttgatgaacctgatttgtaatgcctgtcgcctcttccctcgtttcttctaggacctggcaatgcccagacatctgtgtccccctcaaaagtcatcctgccccggggaggctccgtgctggtgacatgcagcacctcctgtgaccagcccaagttgttgggcatagagaccccgttgcctaaaaaggagttgctcctgcctgggaacaaccggaaggtgtatgaactgagcaatgtgcaagaagatagccaaccaatgtgctattcaaactgccctgatgggcagtcaacagctaaaaccttcctcaccgtgtactgtgagtaactgagcccggagggctggactaggcagacccggtgggagagacgtgcaggggcacctgcagaggcctgggggaatctttgccacttgctcgtagggtcaaggaggggctccttgcagggcaggtggggacatccttggaaagtccctttgtgaatttctttgggtacaattaaagtatttacaggctgggtgcggtggctcatgcctgtaatcccagcactttgagaggctgaggctggcggatcacctgagatcaggagtttaagtttcgccaacatggcgaaaccctgtctctgctgaaaatacaaaaatcagccgggcatggtgtcaagcgcctgtaatcccagctacttggaaggctgaggcaggagaacgcttgaacctgagaggcagagattgcagtgagccgcgatcgtgccagtgcactccagtctggataacagagcaagattccatctcaagaaaaaaaaaatgccatctctctatgcctcactctttgaacatatgacacggtcctgcttcagacactttaataaaagatgcaaattaagccaagtgtggtggcttgtacctataatcccaactactccagaggctgaggcagaaggatggtttgagcccaggagtttgagaccagcctgggcaacagagtgagaccctgtttctttcttttttttttttttttttttgagacggagtctcactctgtcgcccaggctggagtgcagtggtgtgatctcggctcactgcaagctccgcctcccgggttcacgccattctcctgcctcagcctcccgagtagctgggactacaggcgcctgccaccatgcccggctcatttttttgtatttttagtagagacggggtttcactgtgttagccaggatggtctcaatctcctgacctagtggtccgcccgcctcggcctcccaaagtgctgggattacaggtgtaagccactgtgcccatccaagaccctgtttctaccggaaaaaaaaagtaaataatttagctgggcatcgtggtgtgcacctgtaatcccagctgctcctgaggctgtgatgggaggattgctttaacccaggggttcgaatcctaggagttcgaatccatcctaggcaacatagcaaaaccccatttttatttaaaaaaaaaaaaaaagatatgagttaaaactagccctgggatggcatttttcacatattggtaacaaacaaaagaattgatggccgggcgcagtggctcacgcctgtaatcccagcactttgggaggccgaggcgggcggatcacaaggtcaggagatcgagaccatcctggctaacatggtgaaaccccgtctctactaaaactacaaaaaattagccgggcatggtggcaggcgcctgtggtcccagctactcaggaggctgaggcaggagaatggcatgaacccgggaggcagagcttgcagtgagccaagatcgtgccactgcactccagcctgggcgacagagcaagactccatctcaaaaaaaaaaaaaaaaaaaagaattgataacagctgtgctgccaaggctattggaacgtaggaggtcctaggacagtgctgttgggagcataaataagcccaaccctgtggcgggaaattgggcatcagttctcaaaatgtcatgggctgggcacggtggctcacgcctgtaatcccagcactttgggaggctgagggaggcggatcacttgaggtcaggagttcgagaccagcctgaccaccatggagaaaccccgtctctattaaaaatacaaaaaaaactagccaggcatagtggcacatacctgtaatcccagctactcgggaggctgaggcaggagaatctcttgaaactgggaggcagaggttgcggtgagctgagattgcgccactgcactccagcttgggcaacaagagcaaaactccatctcaaaaaaaaaaaaaaaagaaataaaagaaggtatgttgaatatgagtggtatgccaccctcacattagggaagggcagtttcggggaggctgtatttatgtataaaatagccctaaaaggaagtgggagaaatgacaatattagctggctatgagaagagaggctgggaggctgtgggagagggcttgggtgtggagaattctttttgttttttcctttttttgagacagagtttcactcttgttgcccaggctggagtgcaatggcacgatctcagctcaccgcaaccttcacctcctgagtttaagtgattctccggcctcagcctcccgactagctgggattacaggcatgggccactacgcctggcaaattttgtatttttagtagagacagggtttctccatgttggtcaggctggtcttgaactctgacctcaggtgatccgcccgcctcggcctcccaaagtgctgggattacaacgtgagccactttgcctggctgagaattctttttttgttgttgtctttttgagatggagttttgctgtgtccccagcctggagtgcaatggtgtaatctcagctcactgcaacctctccctcccgggttcaagcaattctcctgcctcagcctcccaagtagctggaattacaggcgcccagcaccacgcccggctaatttttgtatttttagtagagacgggatttcatcatgttggccaggctggtcttgatctcctgaccttgtgatctgcccgcctcggcctcccaaagtgctgggattacaggcgtgagccactgcccccagccgagaatttctctttgcgtccttcctactttggggacttcgaatggtgggaaagagttatcaaggccaaaataaggaattcaaatgaaaacaaaacaaaatcaaagaagaaaaaacagaagagcactgggcaggctaggcacgtggctcatgcctataatcccagtgatttagaaggccgaagtagaaggatcgcttggaggccaggagttggacaccagcctgggcaacatagcaagaccccatatctacaaaaaataaaaaacctaaccaagcgtgctggcatactagtagtcccagctactcaggaggctgaggtgggaggatcacctgagcctgggaggtccaggctgtagtgagccgtgatgacaccactgcactccagcctgggtgacagagaaagaccctgtctctaaaaaataaaaactggccaagtagctttgggattagccttgggttccagtcccagcaaggcctttaatagcttgggacatgacttctgcatttactttgcaatcaggtgagacctcctctgatggggaaaatgacacggtgagtgacaaaggatgttctcctatcattgtgtcagggcaaggaagcctctgggtaaatgatcaaatgatcagctttgcttctgatttggagggtgggtgagcagatgctgaccttcccaggtgagggaagtccccgaacattcccagcagcttctggaaaccccagggaaacctctttgaaggtcttttctgcatctctgcctgataggtctttttttttttttttttttttttcttttttttgacacacagtcttgctctgtcgcccaggctggatcactgcaacctccatctcccgggttcaagcagttctcctgcctcatcctctccagtagctgggattacaggcacctggcaccacgcctggctaatttttgtatttttagtagagacagggtttcgccaagttggccaggctggtctcgaactctagacctctggtgatccacccgcctcagcctcccgaagtgctgggattacaggcttgagccaccacgcgcggctctgcctgatagctgagagcatagaactccaggtttgagacctggctctgccacatttctccctctatgactgtgggtgccccactttgccttagtttttacctctgtgaaatggagcagatggctggcacaggtagcaaaggagtaaaagttatgtgggagggtggtacctgagagagactctagcttggtcttgccccacccctggtgtaaacataaagaagcctccctggatggctcaatcttctccaaaaaggttagaggtgtaattcctagaggaggcgaccactagctgggctttgaaggatgtgtaggagttcataaggacaggcattctgggcaggaggaacagcctgggcaaaagttgggagcagggagaaatcttgatggaggcaggaggaggaggaggtaggttggtgtaggccaggtgcagtggctcacacctgtaatcccagtgctttgggaggccaaagcaagaggattgtttgagcccaggagttcgagaccagcctgggcaacatagcgagaccctgtctctaagaaaaaataaaaaaattagggtacagtggcatatgcttgtattctcaactactctggaggctcaagtgggaggatcacttgaacccaggaatttttttgtttttgtttttgtttttttgagatggagtctcactctgtggcccaggctggagtgcagtggtgccatcttggctcactgcagcctcctccacctcctgggttcaaccgattctgctgcctgagcctcccgagttgctgggattaaggtgcccaccatcatgcccagctaatttttttgtatttttagtagagatagggtttaccatgttagccaggctggtcttgaacgcctgaccgcaagagatcctcctgcctcagtttcccaaagtgctgggattataggtgtgagccactgagcctggtcaagcccaggaatttgaggttacagtcagctatgattgcaccactgcattccagcccaggtgacagagagagacactgcccctaaaaaaaaaaaaaaaattgattgatgggaggaagggtgaggttggcagagccttgaatgccaggtggaggagctgggactttccttcttggggtgatagggagtcatggagggtttctgagcaggccagggattagatagctgaaggctggatttactggaagccaatgagcagttggctatggtccttgtccacgcggcccatgttgtgggcagtgaccgtattcaagaagggaaggacagacaagtatttgaatacttcagtgaccaggatttggtaaaggactgcaggtcagggtcaagaagaggtgagagcaggacagacttcctccccgctgcaccaggcagctgagctgggtttcctctaggggctgaggtttgagggtacctcaagttctgcaagagtctataggaggtggtaagagagaagagctggaggtcagagttttcttgactatatatatatatatttttttgtttttgtttttaacagcttaacagctttctgttttatttttagagacagggtctcagggtctcactttgtcacccaggctggagtgcagtggtacaatcgtagctgactgcagcctcaaactcccaggctcaagaaatcctcctcccacccttagcctcctgagtagcagggactacaggtgtgagccagcaggaagcccagctggttttttttttttctttggtgttttttgtttgtttgtttgagaccggagtttcgctcttattgcccaggctgaagtgcaatggcaggatcttagctcaccacaacctccgacccccaggatcaagctattctcttgcctcagccacctgagtagctgggattacaggcatgcgacaccacacaaggctaattttgtatttttagtaaagacagggtttctccatgttggtcaggctggtctcgaactcccaacctcagatgatccacctgcctcggcctcccaaagtgctgagattacaggcatgagccaccgtgcccggcctttttttttttttttttttttttgagacagagtctcactctgtcgcccaggcaggagtgcagtggttcgatctgggctcactgcaagctccgcctcccgggttcactccatcctcctgccttagcctcctgagtagctgggactacaggcgcccaccaccacgcctggctaattttttgtatttttagtagagacggggtttcaccgtgttagccaggatggtcttgatctcctgacctcgtgatccgcccgccttggcctcccaaagtgctgggattacaggcgtgagccaccatgtctggcctggccaggctggtcttgaactcctgacttccggtgatccatctgttctggcctcccaaagtgctgggattacaggcataagccaccacgccatgccgaagcccagcttgtttttaatttttttttttttttttggagaaatgaggtcttgcaatgttgcccaagctagccttgaactcctggcctcaaatgaccccgccttggcatcccaaagtactgggattacagatgtgagccaccatgccccagccttgctttcttgagatacgatttagaataccataagattcatcccttttaagcacataattcaatgacttctgtacaaacaaccatgactacaatctaattttaaaatatttcaatcactctaaaaaagaaacctcctgcttatgtacagcgactctgtctacctcttaagtgaattctcctacctttaatagccctattttacagttcaggaaactgaggttcagagagacaaagtcacttacccacagcaaagaagcaaggctgggtatcaaatgcaggacccccccggtcctgatgctttttttttttttttttttttcctctgagagagactctcactctgtcactcagtctagagtacagtggcgcgatctcagttcactgcaatctctgcctcctgggctgaagtaatcctttcctcacaagtaaacctcagcctctcaagtagctgggactacaggcacacaacaccacgcctggctaatttttgtatttttaggtagagacggggtttcactatattggccaggctggtcttgaactcctgacctcaggtgatccgcctgcctcggccccccaaagtgttgggattacaggcgtgagccaccacacgcagcctttttgttattagactctgtcattactgacttttttttttttttaatagaaacagggtctttctttcccaggctaaagtacagtggcatgatcacagttcactatagccttaaactcctgggctcaagtgatcctcctgcctcagcctcccaagtagcagggactacaggtgtgcaccaccacacccagttaaccattcattcattcattcattcatttattttgagatggagtctcgctctgtcacctaggctggagtgcagtggcacgatctcagctcactgcaacctccacctcccaggttcaagagattctcctgcctcagcctcccgagtagctgagactacaggcgtgcaccaccatgccagactaatttttgtatttttaatagagacggggtttcactctgttggtcaggcttatctcgaactcctgacttcgtggatccaccctccttggcctcccaaagtgctgggattaaaggcgtgagccaccgcgccctgccaacctttttttaatttttcttagagatgggggtctccctatgttgcccaggcttgtcttgaactcctggcctcaagtgaccctcttgccttggcctcacaaagtgctaggattacagcctgagccatcacacctggccaacaggtttttttttttgttttgttttgttttttaaagaatgtctaggccaggctcatttactttcacctgtaatcccagcactttgggaggccggggtgggcagatcacttgaggtcaggaattcgagaccagcctgggcaacatgctgaaaccccgtttctactaaaaatacaaaaattagctgggtgtggtgacacgtgcctgtaatcccagctactcaggaggttgaggcaggagaattgcttgaacccaggaggcagaggttgcagtgagccaagatcatgccatcaccctccagcctgggcgacagaaggagactcagtctaaaaacttaattaattaattaattaaaaataaaaatacaaaaattaacctggtgtggtggtgtgtgcctgtaatctaagctactcaggaggctgaggcaggagaatcccctgaatcccagaggcagaggttgcagtgagccaagatcgagccactgtttgcccagtctagtgcactgggctgctgaatttatttgaccagacacctagcaatagactttgaagttcttttccacttttcactctaagatgctgctgtcatgaataaggaatattttgatccccttcacaaacactcggggccctcttaccagttttcactgaagatcttgacattcctatctgcttaggtgtctgggcgtgtttgggggagatactgaagaggtagggctcccaggcaggtgcagttcgtctgttaggcaggcagcaaggtccacttcaccagacacccccacctctgttttcctgcagggactccagaacgggtggaactggcacccctcccctcttggcagccagtgggcaagaaccttaccctacgctgccaggtggagggtggggcaccccgggccaacctcaccgtggtgctgctccgtggggagaaggagctgaaacgggagccagctgtgggggagcccgctgaggtcacgaccacggtgctggtgaggagagatcaccatggagccaatttctcgtgccgcactgaactggacctgcggccccaagggctggagctgtttgagaacacctcggccccctaccagctccagacctttggtgaggattgaagaagccagcagggagaaggtgggggtggggtatcctgcaatgcggtgcctgtggccacaggatcttttgagatgggtgtggccccggctaaggggtgcatgtgttctaggcgtatgtgacctaggctgctgagtggccctggaagaggatctcgcaggagggggaatgaaatgccccagagaagggcttcgggacgtccatccctgtctgctcacacctttcttctctccctagtcctgccagcgactcccccacaacttgtcagcccccgggtcctagaggtggacacgcaggggaccgtggtctgttccctggacgggctgttcccagtctcggaggcccaggtccacctggcactgggggaccagaggttgaaccccacagtcacctatggcaacgactccttctcggccaaggcctcagtcagtgtgaccgcagaggacgagggcacccagcggctgacgtgtgcagtaatactggggaaccagagccaggagacactgcagacagtgaccatctacagtaagaaggggcaggggcggagtggggcttcttgggggtgtgacctgaacccggggcggggctcactgtgtgcctattccaggctttccggcgcccaacgtgattctgacgaagccagaggtctcagaagggaccgaggtgacagtgaagtgtgaggcccaccctagagccaaggtgacgctgaatggggttccagcccagccactgggcccgagggcccagctcctgctgaaggccaccccagaggacaacgggcgcagcttctcctgctctgcaaccctggaggtggccggccagcttatacacaagaaccagacccgggagcttcgtgtcctgtgtgagtggggctgctggtcaatggcccctatcccccaaggcccaatctccctgaaggtcccataaggtcttgcctccaagtcctgcccccacccacctccatgtcatctcatcgtgtttttccagatggcccccgactggacgagagggattgtccgggaaactggacgtggccagaaaattcccagcagactccaatgtgccaggcttgggggaacccattgcccgagctcaagtgtctaaaggatggcactttcccactgcccatcggggaatcagtgactgtcactcgagatcttgagggcacctacctctgtcgggccaggagcactcaaggggaggtcacccgcaaggtgaccgtgaatgtgctctgtgagtgagccggcgggcagagctgggtgggggcaggggccatggacctaatgcaatcctcaccgcctgttgtatcctccccacagccccccggtatgagattgtcatcatcactgtggtagcagccgcagtcataatgggcactgcaggcctcagcacgtacctctataaccgccagcggaagatcaagaaatacagactacaacaggcccaaaaagggacccccatgaaaccgaacacacaagccacgcctccctgaacctatcccgggacagggcctcttcctcggccttcccatattggtggcagtggtgccacactgaacagagtggaagacatatgccatgcagctacacctaccggccctgggacgccggaggacagggcattgtcctcagtcagatacaacagcatttggggccatggtacctgcacacctaaaacactaggccacgcatctgatctgtagtcacatgactaagccaagaggaaggagcaagactcaagacatgattgatggatgttaaagtctagcctgatgagaggggaagtggtgggggagacatagccccaccatgaggacatacaactgggaaatactgaaacttgctgcctattgggtatgctgaggccccacagacttacagaagaagtggccctccatagacatgtgtagcatcaaaacacaaaggcccacacttcctgacggatgccagcttgggcactgctgtctactgaccccaacccttgatgatatgtatttattcatttgttattttaccagctatttattgagtgtcttttatgtaggctaaatgaacataggtctctggcctcacggagctcccagtcctaatcacattcaaggtcaccaggtacagttgtacaggttgtacactgcaggagagtgcctggcaaaaagatcaaatggggctgggacttctcattggccaacctgcctttccccagaaggagtgatttttctatcggcacaaaagcactatatggactggtaatggttacaggttcagagattacccagtgaggccttattcctcccttccccccaaaactgacacctttgttagccacctccccacccacatacatttctgccagtgttcacaatgacactcagcggtcatgtctggacatgagtgcccagggaatatgcccaagctatgccttgtcctcttgtcctgtttgcatttcactgggagcttgcactatgcagctccagtttcctgcagtgatcagggtcctgcaagcagtggggaagggggccaaggtattggaggactccctcccagctttggaagcctcatccgcgtgtgtgtgtgtgtgtatgtgtagacaagctctcgctctgtcacccaggctggagtgcagtggtgcaatcatggttcactgcagtcttgaccttttgggctcaagtgatcctcccacctcagcctcctgagtagctgggaccataggctcacaacaccacacctggcaaatttgattttttttttttttccagagacggggtctcgcaacattgcccagacttcctttgtgttagttaataaagctttctcaactgcctcagccttgtgtgagttgaggggaggtgtcacatccagctggagtcctttctaagcagccacagcctgatcctcccacttcctcccccaagaaaacattgtgggttgatggccataccctgaggttctggtccaaatcggactttctatgaccttctgggtctctagtgaaaactaaagactcctctccagaaaaaaacatttggtttctaatgaggcctggaatcttattcttgacctggggagcggaatccctttttgcagtactcccgggccctctgttggggcctccccttcctctccagggtggagtcgaggaggcggggctgcgggcctccttatctctagagccggccctggctctctggcgcggggccccttagtccgggctttttgccatggggtctctgttccctctgtcgctgctgttttttttggcggccgcctacccgggagttgggagcgcgctgggacgccggactaagcgggcgcaaagccccaagggtagccctctcgcgccctccgggacctcagtgcccttctgggtgcgcatgagcccggagttcgtggctgtgcagccggggaagtcagtgcagctcaattgcagcaacagctgtccccagccgcagaattccagcctccgcaccccgctgcggcaaggcaagacgctcagagggccgggttgggtgtcttaccagctgctcgacgtgagggcctggagctccctcgcgcactgcctcgtgacctgcgcaggaaaaacacgctgggccacctccaggatcaccgcctacagtgagggacaggggctcggtcccggctggggtgaggggagggggctggaagaggtgggggaagggtagttgacagtcgctctatagggagcgcccgcggacctcactcagaggctcccccttgccttagaaccgccccacagcgtgattttggagcctccggtcttaaagggcaggaaatacactttgcgctgccacgtgacgcaggtgttcccggtgggctacttggtggtgaccctgaggcatggaagccgggtcatctattccgaaagcctggagcgcttcaccggcctggatctggccaacgtgaccttgacctacgagtttgctgctggaccccgcgacttctggcagcccgtgatctgccacgcgcgcctcaatctcgacggcctggtggtccgcaacagctcggcacccattacactgatgctcggtgaggcacccctgtaaccctggggactaggaggaagggggcagagagagttatgaccccgagagggcgcacagaccaagcgtgagctccacgcgggtcgacagacctccctgtgttccgttcctaattctcgccttctgctcccagcttggagccccgcgcccacagctttggcctccggttccatcgctgcccttgtagggatcctcctcactgtgggcgctgcgtacctatgcaagtgcctagctatgaagtcccaggcgtaaagggggatgttctatgccggctgagcgagaaaaagaggaatatgaaacaatctggggaaatggccatacatggtggctgacgcctgtaatcccagcactttgggaggccgaggcaggagaatcgcttgagcccaggagttcgagaccagcctggacaacatagtgagaccccgtctatgcaaaaaatacacaaattagcctggtgtggtggcccgcacctgtggtcccagctacccgggaggctgagttgggaggatcctttgagccctgaaagtcgaggttgcagtgagccttgatcgtgccactgcactccagcctgggggacagagcacgaccctgtctccaaaaataaaataaaaataaaaataaatattggcgggggaaccctctggaatcaataaaggcttccttaaccagcctctgtcctgtgacctaagggtccgcattactgcccttcttcggaggaactggtttgtttttgttgttgttgttgtttttgcgatcactttctccaagttccttgtctccctgagggcacctgaggtttcctcactcagggcccacctggggtcccgaagccccagactctgtgtatccccagcgggtgtcacagaaacctctccttctgctggccttatcgagtgggatcagcgcgggccggggagagccacgggcaggggcggggtggggttcatggtatggctttcctgattggcgccgccgccaccacgcggcagctctgattggatgttaagtttcctatcccagccccaccttcagaccctgtgctttcctggaggccaaacaactgtggagcgagaactcatctccaaaataacttaccacgctggagtgagaccacgaatggtggggaggggagggtcccacggacatattgagggacgtggatacgcagaagaggtatccatgtggtggcagccgggaaggggtgatcagatggtccacagggaatatcacaaactcgaattctgacgatgttctggtagtcacccagccagatgagcgcatggagttgggggtggggggtgtcaaagcttggggcccggaagcggagtcaaaagcatcaccctcggtcccttgttctcgcgtggatgtcagggcccccacccaccgagcagaaggcggactcaggggcgctccagggtggctcgagctcacacacgctgagtagacacgtgcccgctgcaccctgggtaaatacagacccggagccgagcggattctaatttagacgcccgcgaacgctgcgcgcacgcacacgtgtcctcggctcgctggcactttcgtcccgccccctccgtcgcgtgcgggagctgacccggaggggtgcttagaggtatggctccgcggggtcaaaaggagaaggatcagtgagagaggcatccccacaccctcccctagaactgtcctttccccatccagtgcctcccaaatctctcttagtccccaaatgtatccccgccctaaggggcgctggtgggaggagctaaatgtgggggcggggctcggagtccagcttattatcatggcatctcagccagggctggggtaggggtttgggaagggcaacccagcatcccccgatcccagagtcgcggccggggatgacgcgagagagcgtggtcgcccccagaaggccctgggccatcatgccggcctccacgtagaccccaggggtcgctcactcctgccagctcgccttcaccaaggccaggagcttagcgcacgctcgcctcccgcccccccgccgcctctgccgccgccccctccttggaaaccaagttaccaacgttaaaccaatccccaagcgcaactctgcctcccccacaccccacccgccgcgccgcgcggagccgtcctctagcccagctcctcggctcgcgctctcctcgcctcctgtgctttccccgccgcggcgatgccagggccttcgccagggctgcgccgggcgctactcggcctctgggctgctctgggcctggggctcttcggcctctcaggtaagagccccgctctggttcggggtggacagggcgggggcggagtccctggacctgagaaacggcctcctgtccctcccagctctgccctcgcctcgctcccacgcctctgcccccacctcgagcctgagtcttctccccttccccctcctccccaacacacacccgagccccagcttcctgactcctcgatagcccctacccgcttcgagatcctaggtgttcttccgcacccaacccttcgccctggagacccagtgtctctcctgtccgctccccgggtacctccttacgctgtgctgtgcaccatggtccacggactggcatcttccccactcgcggtccgcgaagactccatctctccaactaccctgactcagaggcgctgttcccgctccacccagagccctggcaaccgggtccctcagctgttcccgcggttccttccatgagcccagccttgcgtcccggctccgtgttcttcaccgggtgtagggtccttcctgatccttgacccagcctcgtctctcctttgcccttgccgcaaacgcactctcctcgtatcccggcattctgccaggaccctgagaactggttcatcccccatcccccatcccgggtccccttctctcagccttgctgtgttcatccaagaacccacctttcctctcctctacgccctccccccatgctttcccgccgctccatcggcgctttggagaccatggctctctgctaccacgtcccagagacaccctcgaggtttagactctgggagtgcgcctttaaaccggaggcctgggcaggacgcgggacgcctgggttctttccctggctgcagcctctcctcctcctccccgccctctgagaacccttgactcgacataggggcgctaagatgtcagggagttggctccccaggctcagcccgcgtttccctgggcagcggtctcgcaggagcccttctgggcggacctgcagcctcgcgtggcgttcgtggagcgcgggggctcgctgtggctgaattgcagcaccaactgccctcggccggagcgcggtggcctggagacctcgctgcgccgaaacgggacccagaggggtttgcgttggttggcgcggcagctggtggacattcgcgagccggagactcagcccgtctgcttcttccgctgcgcgcggcgcacactacaggcgcgtgggctcattcgcactttccgtgagttctgggtggccacgcgcgtactccactactctccctccctcccaggccccgccccctgggtcccagggtcctccccttcaggccccaccttctgttccaagtcccggtgttcaaagagctgcggactcttcccccttgcagagcgaccagatcgcgtagagctgatgccgctgcctccctggcagccggtgggcgagaacttcaccctgagctgtagggtccccggcgccgggccccgtgcgagcctcacgctgaccctgctgcggggcgcccaggagctgatccgccgcagcttcgccggtgaaccaccccgagcgcggggcgcggtgctcacagccacggtactggctcggagggaggaccatggagccaatttctcgtgtcgcgccgagctggacctgcggccgcacggactgggactgtttgaaaacagctcggcccccagagagctccgaaccttctgtgagtgggtgtggggaggagatggggacccagtggggtcggtcggtgtttaggaggtttagaggtagatacatctgaatgctgaccccgacttcaaccctcgccggctgagctgtttccccctccgtgccttgaggatgataatacgataagatagtgcatgtcaagtgcttaggacatattgagcgctcggagttagttcaaacttggttcttcgacccctagccctgtctccggatgccccgcgcctcgctgctccccggctcttggaagttggctcggaaaggcccgtgagctgcactctggacggactgtttccagcctcagaggccagggtctacctcgcactgggggaccagaatctgagtcctgatgtcaccctcgaaggggacgcattcgtggccactgccacagccacagctagcgcagagcaggagggtgccaggcagctggtctgcaacgtcaccctggggggcgaaaaccgggagacccgggagaacgtgaccatctacagtaaggaaggaggcggggtctccgcggctccgaggtgggaccagaggaatgcgaaggcggggcgaagagtgggcgggacctcagtaccggaacaggcgtggcccgaggggcggggcaggtgggggcggagacgtaatcgctggggaggaggagcctgtacagcctgagaggcggggcgccgtaccctagttcgttctcagcaccccgaggattcgggcagataaggggcgggccttgaccggagggaggggtatggtcagtatactacgaccaaatgctccgcccccaggcttcccggcaccactcctgaccctgagcgaacccagcgtctccgaggggcagatggtgacagtaacctgcgcagctggggcccaagctctggtcacactggagggagttccagccgcggtcccggggcagcccgcccagcttcagctaaatgccaccgagaacgacgacagacgcagcttcttctgcgacgccaccctcgatgtggacggggagaccctgatcaagaacaggagcgcagagcttcgtgtcctatgtgagttggtgataacccctcgccccccaccttctggtgacttccaaggacccgcctgctccctcaccgtgtcgtggaggcggagccatttcttacgtctaagcctctgtaaccccacgccctgcccgcagacgctccccggctagacgattcggactgccccaggagttggacgtggcccgagggcccagagcagacgctgcgctgcgaggcccgcgggaacccagaaccctcagtgcactgtgcgcgctccgacggcggggccgtgctggctctgggcctgctgggtccagtcactcgggcgctctcaggcacttaccgctgcaaggcggccaatgatcaaggcgaggcggtcaaggacgtaacgctaacggtggagtgtgagtgggggtgcgcagggtgcatttctatctggttcaaggtctggagggtggccagcctccagggaagagtaggagtagggtatgaggtgtccctttgggtgaggttttgggaaagggaagaggctggttagtggggttggagaaagatcttggaggatggaagggaccgggtgggcgtgcccctagcctagggcgtggtatttgggcggagtcgtggaaaggcgggcagtccagagtgtttaagtttttagacgaaaaaggcgccactggtggctcaggaagctcccagacagagtgcatgcctcgactagcgtgacacctccttggatcggcgtccaagggttatgcagggacaacacttcgtggaagccttgccgcgccaaggagggtctagggacgtcagatttgcccccaaaccccaaagccaacaatacactccctcctccagacgcaccagcgctggacagcgtgggctgcccagaacgcattacttggctggagggaacagaagcctcgctgagctgtgtggcgcacggggtaccgccgcctgatgtgatctgcgtgcgctctggagaactcggggccgtcatcgaggggctgttgcgtgtggcccgggagcatgcgggcacttaccgctgcgaagccaccaaccctcggggctctgcggccaaaaatgtggccgtcacggtggaatgtgagtaggggcaccgcggagttaggcaggatctgtgggacaaccccggctggacttcctggcccccgtgtgagcccctgcaatcctgtttcccagatggccccaggtttgaggagccgagctgccccagcaattggacatgggtggaaggatctgggcgcctgttttcctgtgaggtcgatgggaagccacagccaagcgtgaagtgcgtgggctccgggggcgccactgagggggtgctgctgccgctggcacccccagaccctagtcccagagctcccagaatccctagagtcctggcacccggtatctacgtctgcaacgccaccaaccgccacggctccgtggccaaaacagtcgtcgtgagcgcggagtgtgagcgaggcccaggcgggtagggagcaggggtgccccacggtccaggcactccctgacatcccccatggctgctttgcagcgccaccggagatggatgaatctacctgcccaagtcaccagacgtggctggaaggggctgaggcttccgcgctggcctgcgccgcccggggtcgcccttccccaggagtgcgctgctctcgggaaggcatcccatggcctgagcagcagcgcgtgtcccgagaggacgcgggcacttaccactgtgtggccaccaatgcgcatggcacggactcccggaccgtcactgtgggcgtggaatgtgagtgggggcagcaccggatggaggggacacggtcctcggaagaatgactcgcagcggtgggagcattcaagggcacctctcccaatcccattctcggggacagggaattccagcctaaaccagggggtaatgaaaattctagccaggcgcagtggctcaggtctgtaatcccaacactttggaaggttgaggcggatgaatcacttgaggccaggagttcgagaccagcccggccaacatggcgaaaacccgtctctacaaaaattagccggtcgtggtggtgggcgcctgtggtcccagctacttgggaggctgaggcaggagaatcgcttgagcctgggaggcagaggttgcagggagccgagatcccgccactgcactccagcctgggcaacagagtgagactctttcttagaaaaacagaaaaagaaaattatagggaataggagcacggccctcctcaaatcctggattagaacactgacctgggcttcacctccttccattcggtgaagaagggcgaggaattttagccgcaacagcagcctgattgtcggggaaggaggctctgataggaggcaggatcctcttctgcccatcagaggcgcggtggtctcccatcgatcgttgtgggccggagcagggcatttgatcagtggctgggccggcgctaagccccacttcaccttctgtgcccttcagaccggccagtggtggccgaacttgctgcctcgccccctggaggcgtgcgcccaggaggaaacttcacgttgacctgccgcgcggaggcctggcctccagcccagatcagctggcgcgcgcccccgggggccctcaacatcggcctgtcgagcaacaacagcacactgagcgtggcaggcgccatgggaagccacggcggcgagtacgagtgcgcagccaccaacgcgcacgggcgccacgcgcggcgcatcacggtgcgcgtggccggtaagtggcagctggggagaggcggggcgaggtatctgagagggggcgtgacctgggtcttggggcggccggccccgcctgcctccctctcggtcccggtagactagacggaagtgggacagagtagaagtcaaaggtgccttagcgggtggggctgttgatcgcactttgaggggtgggagatggaggtggcagggggactgaattcaaggggagggaccctccggggctgtcactgctgcaggaaaggactttaaaacttgggctggattctgcgtggtggaaacttgacccaattcacaatccactgtggggaagattggggagggaccaaagtcattggatgttggagggagagaggggtcaagatcgccttctctcacttcctgaagctcctggggctgggttctctctggggtcgggggaacctgacctggtcctgccggtcctcattttttgggggatggggagagttgacttgtcgccagggggctaagtgtggtcacgggtttatatccccatgggctgaagtgcgatataaatcgggactcgggtcgccctggcactgggagtggccttattgcatgggttgtctcccttctcccaaggccagacagtgagctccccggggcatgaggactgacttcgtgcctgtgggagtgcggggggcggtgggagaagccccccggagcttggccaccctccgcgagggtctccaccccgcaggtccgtggctatgggtcgccgtgggcggcgcggcggggggcgcggcgctgctggccgcgggggccggcctggccttctacgtgcagtccaccgcctgcaagaagggcgagtacaacgtgcaggaggccgagagctcaggcgaggccgtgtgtctgaacggagcgggcggcggcgctggcggggcggcaggcgcggagggcggacccgaggcggcggggggcgcggccgagtcgccggcggagggcgaggtcttcgccatacagctgacatcggcgtgagcccgctcccctctccccgcgggccgggggacgccccccagactcacacgggggcttatttattgctttatttatttacttattcatttatttatgtattcaactccaagggcgtcacccccattttctacccatcccctcaataaagtttttataaaggaactccctgtctccgcttctgtttctgcaaggtggaacaagcccagggttccagtcgtgacctcccgagttattcattcaaaaagcgatttttgagagggcctggggtggtggcttaggcctgtaatcccaggacttgtgggaggcccaggtgggaggatcccttgcacccaagagtttcagaccagcctgggcaacatagggagaccctacaaaaaatatttttcaaaaattagccaaggccggtcgcggtggctcatgcgtgtaatcccaggactttggaaggccgaggcggccagatcacgaggtcgaggtcatgagatcgagaccatcctggccaatatggtgaaaccctgtctctactaaaaatacaaaaattagctgggcatggtggtgcgcgcctgtagtcccagctattcgggaggctgaggcaggagaatcgctttaaccccggaggcagaggttgcagtgagccgagatcgtgccactgaactccagcctggcgacagagcgagattccgtcttaaaaaaaaaaccaggcgtggtggctcacgcctgtaatcccagcactttgggaggccgaggcgggcggatcacgaggtcgggagatcgagaccatcctcgctaacacggtgaaaccccgtctctactaaaaatacaaaaaaaaaaaaaaaaaaaaaattagccgagcgtggtggcgggcgcctgtagtcccagctactcaggaggctgaggcaggagaatggcatgaacccggggagcagagcttgcagtgagccgagatcgcgccactgcactccaccctggcagacagcaagactccgtctcaaaaaaaaaaaaaaaaattagccagggccgagcacagtactctcgcttgaatcccagaactttgggaaactaaggcggggggggggggtcacttgaggtcaggagttcgagaccaccctggccaacgtggtgaaacaccttctctaccaaaaatacaaaaaaattaaggccgggtgaagtggctcacgtctgtaatcccagcactttgcgaggctgaggcgggcggatcatggggttagaagatcaagactgtcctggctaacatggtgaaaccccgtcactactaaaaacacaaaaattagccgggcgtggtggcacatgcctgtagtcccagctactcaagaggctgaggcaggagaatcgctttaaccccggaggcagaggttgcagtgagccaagatcgcaccactgcactccagcctgggcaatagagcgagactctgtctcaaaaaaaaaccaaaaacaaaaacaaaaaaatacaaaaatttagctgggctgtagtggcacacgccctgtaatcccagctactcgtgaggctgaggcaggagaattgctagaacccgggaggtagagatcttgccattgcactccagcctgggcaacagaactagactctgtctcaaaaaaaaaaaaaaaaaaaaaaaagtgttttttgagggggctgggcatggtggctcaagcctgtaatcccaggacttttgggaggcccaggtgggaggatcccttgtgcccacgagtttcagaccagcctgggcaacatagcgagaccctacaaaaaaacatgtttcaaaaaaaaatttttttttttgagatggagtctcgctctgtcgcccaggctggacagcagtggcactatctctgctcactgcaagctccgtctcccgggttcatgccattctcctgcctcagcctcccaagtagctgggattacaggcgcctgccaccacacccagctaatttttttttgtatttttagtagagatgggatttcaccgtgttcgccaggatggtctctattcctgacctcgagatccacccgcctcagcctcccaaagtgctgggattacaggcgtgagccaccgcgcccggcctcaaaaaaaaaattttttttttgagatggagtcttgctctgtcacccaggctggagtgctgtggtgtgatcttggctcactgcaacctctgcctcctgggttcaagcaattcccctgccttggcttcccaaatagctgggactataggcatgcaccaccacacccagctaatttttgtatttttagtagagacagggtttcaccatgttggccaggctggtctcgaactcctgacctaaggtgatccacctgcctcggtctcccaaagtgctgggattacagctgtaagccaccatgcctggtgtatttttcaaaaattagccagacatggtggtgcatgcctgtagtcccagctacttgggaggctgaggcaggaggatcctttgagcctaggaggtcaaagccacttccagctatgatatcgtcattgtgctccagcccaggtgacagaaccagaccctgtctctaaaaacaaacaacgaaaaaatccaaaaactttttttgaacacctactatgcatcaggcacaatctaagctgtctttttctttttcttttttttttttttttgagacggagtctctctgtcgcccaggctggagtgcagtggtgtaatctcagctcactgcaagctctgcctcccacgttcaagcgattttcctgcctcagcctcctgagtagctgggattacaggcgcgcgccaccactacgcccggctaatttttgtatttttagtagagacagggtttcaccatgttggtcaggctagtctggaactactgacctcgtgattcacctgcctcggtctcccaacgtgctggaattacaagcctgagccactgtgcctggcccggctggctgtcttttctcagtgtgacctagagctcgtcctctctcagtgcctgttttctgctctcttcacacccttgggcaggggtgggggcctcactccttcctcctacttatctcttccacccagcactgccctctgatccgggtcactcttggaggtgggggctaggtgcttcccccaggcctggttaccggcagagctgaggccgccttgccagggtgggtggaggccctctccgttgtgcccctgccctgagacttcggtgagaccttcctgggcaggcactggctgatgctatgggtgtcagcccttagcatgtcctccctgttaaagggggcacccctgccccgccctcaatgcctcctttgtcctgtgtccacccacagtgcttcagtttacccccaccctgcctttccactcagcccatcatgattcagaacagacacacacagggtatccgctgcaacccccactacacggcaccttcccccctcatccccaacagcataaggcacagcagctgggcctcctccccacagcctcctcctctgcccctcctccctcaaaagcaggaacacggagccctagagaaggaagccagtcccatgcaaacatgtaatgagcaaagatgagacggggaaatggcacaagagggcaggccagtgctcggtgctggagccaggggccaggtataacacccaaaaaggcaccagccaggtgcagtccctgccactaacagcacctcaccttttctgcctgtgccctccctacttaatgatctctctccgctcctactgacctcaaggtctctttcagagccttcagatgagatatttattttagtaggttggtgcaaaagtaattgctgtttttgccattgaaagtaatggcaggcagggcatggtggctcacgcctgtaatcccagcactttgggaggccgaggtgggcagatcacgaggtcaggagttcaagaccagcctggctaacatggtgaaaccctgtctctactaacaatacaaaaaaaattagccggacatggtggcacacccctgtagtctcagctacttgggaggctgaggcaggagaactgcttgaaccctgaagcggaggctgcagtgagctgaaatcacgccactgcactccagcctgggccacagagtgagactgtctcagaggaaaaaaaaaaaaaaaaagtaatggcaaaaactgcaattactttttctttttctttctgtttttttttttgtttgtttgtttgtttgtttgtttgtttgagacggagtctcactgtgtggcccaggctggagtgcagtggcgcaatcttggcttactgcagcctccgcctcccaggttcaagtgattctctcctgcctcagcctcccaataggattacaggcacccaccactatgcctggctaatttttgtatctttagcagagatggggtttcaccatgtttgccaggctggtctcgaactcctgatccacccacctcagcttcccaaagtgctgggattacaggcaggcatgagccatggtgcccgacatttttttttttttttctttttttttttgagacagagtctcactttgtcacccaggctggagtgcaaaggcaagatctcactgcagcctctgcctcctgggttaaagcgattctcccaccttagccccctgagtaggtgagattacaggcacatgccaccacacctgcctaatttttgtatttttaatagagagggggtttcaccattttgtccacgctggtctcgaactcctgacctcaagggattcgcccacctcagcctcccaaagtgctgggattacaggcatgagccaccacgcccgacctccttaactcttttatttccttgcacactttttctctgtagcccagctcacaacttaacatcctcttagacatacacctgaggttttttttttttttttttttgagagggagtctctctctgtcacccaggatggaatgcagtggtgtgctctcagctcactgcaaccttgcaaccactgcctcccaggttcaagcaattctcctgcctcagcctcccgagtagctgggactacagacacatgccgccacacctggctgattttttgttttttagtagagacagggtttcaccgtgttgcccaggctggtctcaaactcctgagttcaggcagtccgcctgccttagccttccaaaatgctgggattacaggcatgaggcaccgcgtcctgcctctgagttttttttttttttttttttttactgtctcctagaacatcagccccagtagagcagggatctttgttctgttcaccactgagggtcctcattgggtcctagcacacacagttgctcaataaatgttgaataagtgggtaaagacagccacgagcttgcagatatgtgttcaaggtgtgtccttgcagagagcttctctatacttggcactggagaggcctgtcgtgggcaaggacatagatgtggcgacctcagacttgagaactcctggggcagtaggggagatggatgtggataatgtaaccataagccttcctttctattttagactgagtggtcaaggaaggcttccagacaatggaaattctgataggttctaagagggagaccagcaaggagctgaaccggaggctgacacagggtgagagtgggaatgtctattttattttttttttggagacagggtctcactctgttgctcaggcagcagtgcagtggcacgatcgtggctcactgcagcttcaacttcccagactcaagtgatcctcccacctcagcctcccaagcagctgggaatataggtgcatgccaccacatccggctaatttttgtatttttggtagaaacggggtttcaccatgttgcccaggctggtcttgaactcctgggttcaagtgatcttgctgccttgggctcccaaagtgcttggattacaggtgtgagcctgtgagccacatctggcctattttattttttaattagttttttgtttttgtttttgttttgagatggagtctctgtctccaaggctggagtgcagtggcacgatctcggctcactgtaacctccacctcccaagtagctgggattacaggcacatgccaccacgcctggctaatttttgtatctttagtagagacagggtttccccatgttggccaggctggtctcgaactcctgacctccggtgatccacctgcctcagtttcccaaagtgctgggattataggaatgagccactctgcctggctgggcatgtgtcttgtttttttcattctgtagataacaagcaattgtcctccctcagcctcccaagtagctggtactacaggcgcctgccactacgcccggctattttttgtagttttagcagaggtggggtttcaccatgttaaccagtctctaactcctgacctcaggtgatcctcctgccttggcctcccaaagtgctggaattacaggtgtgagccaccaagcccagcctcaaactcctgagtttaagtgatcctcacacctcagcctccctgagtgctgggattacaggtgtgagccaccacacccggcctgagtcgggggaggtgtctattttagtctgagtggtcaaggaaggcttctctgaagagctgatgttggggccaggcctcctcaagcgattagaaggtgtcagccatggggagatgtggagggagggtgtttcaggccaaggaagggtaagatcaaataattcagggatctgagggcagaggaatctggactccagttctcccattcagggctgcccaggagagacaaagaggatctcataagggtgtgtggctttgtggctcactcacgcccacagcaaggaccatgcccaccctacttttttttttttccccaagtctccctctattacccaggctggagtacagtggtacgatcacggttcactgcagtcttgacctccagggctcaagtgatcctcccacctcagtgtcctgagtagctggcactacaggcatgcaccaccacccctggctcattttttgattttttggtagagacggggtctcactgtgttacccaggctggtctcaaactcctgggctcaagcgatcctcccacctctgccttctgaagtgttgggattacaggtgtgagccaccatgcccagcccgccaccagtcttgactctccatcctccctccctccctgtgagtgctggtggcctgtgtgtcccgcctgctgaaagatgcctctgacttggggcttttgacttcaggcccgggagacacattttggctggattagggagatcttaaaagggggtaggggacacagcaggggctaaggagagtgacacactgcaggcaggggttgggtgacagatgaaggatccactggtatatgctgccagtgtgtgccatctacttgtgtgttttacgtgtgtctggtgcatgtgtcctgtgtgggctgtatctgtgtgtgactcagctacgtgtcagcatatccctgtcgacgtgtgtctctgctgatgtgtctgtcagcacgcacggctgtcttgcatgtgtcttttttgagatagagtctcgctctgtcacccaggctggagtgcagtggcacgatcttggctcattgcaacctcaacctcccaggttcaagcgattctcctgcctgagcctcccaagtagctcggattacaggcacatgctaccacgcctggctaatttttgcatatttagtagagacggggtttcatcatgttggccaggctggtctcgatctcctgacctcaggtgatccacctgcatcagcctcccaaagtgctgggattacagaaatgagccactgtgcctggctagacatgtgtctttttttttcccttctgtatataacagggtctcactatgttgcccaggctggtctcaaactcgtggcctcaagcaatcctcctgcctcagcctcccaaagtgttgggattacaggcgtgagccactgcacccggcttgtgtgtgtctttctgtatctgttgtgtgtgtctgtgggtagtggctgtttccctgcatgggacattgtggtaaatgtggctaattccctgtgtgggggctgctgcctgtggataagactgtgtctctgtgcatgcgcacgtgtgtgcacgcccctcacaaccccaacgagaaaacacctgtccaccttcctgggctggcacaggggcacaggaggcgggatcccaaatcacaggctttttctctcggcatatctctgtactttattgtccctgctgtaacaatgctcatccttcctgagagcgtctcctgagggggcctcggccaaggctgactggagaaggggctggtgacccctagcaggctctgccacctgaggcctgggtcttcccccgggatccttgaatctggagatggcagagaggaggcaggccggctctttccccaatcctcctaggagagctgcttctgcccattctcccactggtgaaacggaggcagaagcagcagctcagcagggtgaagctgggtttaaccttcctgaatggggtccagggacactccacatctgccacatagcctcttgggctggacatttttcctgggcaccagccagcagctggagcagcgagtgccgtatttcttgtacctagggttgggggacaagaaactgccatttaggatgcagtgggggcccggaaaccgccacaaggaaaccacttttcccaagaggtaggtgttttgctttttgctttccccacaggccatcctggttacacgtggactgatttggggacccccgccccaactccctcctccattctaaggacctgatcccacaggcgttgcagagaggggtcccatcttcagcgtctctccagagcggggtcctctgggtccgacaggaagcacagcgccggggctctgaagggtcagaggtcaaagggcaggggtcagaggccaagcatgtgagctcgggatgcctgtgcggagtcgggcattttgtgggggtctcagtaaaggccccacctagctctggatcagccctgggagttgccagctctaagccacagcaaagccaggaagggagacagatggcagcattccgcagaggaggaagctgggggtgggggtgactcagcccaagtggaggggggtgctgcgactcctccctgagggctctaaatggggaagcaagatggagaaggggggggcagggagaaaggcagggaagacaggaaattggcccccaaaatatttatagctcttgggttttcaggactcacccagggcctcgctgcctgctgagtgggcctcggtgcctcctgggtgggctgcagggcccccaacagcatctgcaggggattcctgagaacggctactgcagggcaggctgtggggcagacaaggtattagcactgggggggatctgtagcttgtccccaacagccctccgaaatgaagatttagtatcaaggtatcagccatcccccgaggaggcaactaatatctgaatggcctggctttgcctctcattagtaatattattattattattattattatttttgcagatggagtctcgctctgttgcccaggctggagtgtagtggtgtcatctcagctcactacaacctccacctcccgggttcaagcaattcttgagcctcagcctcccaagcagctgggactacaggcgcgcgacaccacgcccagctaatttttgtatttttagtacagacggggtttcaccatgttggccaggctggtctcgaactcctgacctcaagtgatccacccacctcggcctcccaaagtgcagggattacaggcatgagctaccgtgcccgacctaattattattattattatttgaaaaatagtaagcacagggacagcctgccaggttccaatcccagttctccatgtccttgctgtgtgagcctggacacattatctcctactctgtgcctcagtttcctcatctgtaaaatgggcttcccaatacaacagtttttttttctttgaaaatttgatttattgatttttaaaaagagatgggagtctgggcaatatagggagaccccgtctctacaaacaaaaaaaatagccaggagtggtggtacaggcctgcactcccagctagttgggaggctgaggagggaggatggcttgggcctgggaggtccaggctgcagtgagccatgattgcgccactgcactccaccctgggtgacagagcaagaccctgtctcaaaaacaaacaaacaaacaaaagcaaaaaaaagcagccaggcatggtggcggctcactcctgtaatcccaacactttgggagggcaaggcagatggatcacctgaggtcaagagatcgagaccatcccggccaacatggcaaaaccccatctctactaaaaatacaaaaattagccaggcgtggtagcaggcacctgtaatcccagctactccagaggctgaggcaggagaatcgtttgaatccgggaggcagaggttgcagtgagccgagattgtgtcattgcactccagcctgaacgacagagtgcaactccatctcaaaaaaaaaaaaaaatattgttttggcggcatgattaaaaaagtcataattataatttttataataacaataaataggtaaaaattagagctgggggtcatactatgttgcccaggctggtcttgaactcctgggctcatgcaatcctcccaccttggcctcccaaagtgctgggattacaggtgtgagccaccaggcccagcttcccaaagcttttttttttttttttttaaggggatggagtcttgctctgtcacccaggctggagtgcagtggtgccatctctgctcagtgcaacctccacctcctgggttcaagcgattctcctgcctcagcctcccaagtagctgggattacaggtgcccattaccattcccagctagttttttttttttttttgagactgagtcccactctgtggctcaggctggagtgaggtggcgctatctctgcttactgaagacttcacctcctgagttcaagcgattctcctgcctcagcctcctgagcagctgggattacaggcacccactacaacgcccagctaattttttgtatttttagtagacatggggtttcactatgttggccaggctgatctcaaactcctgacttcaggtgatctgctcgccttggcctcccaaagtgatgggattataggcgtgagccactgtgcccggcctccccaggcttttgaatgagcccatacacataaaatactgcctgttaacctcttattgttgtcactaccaacaaatagtagctgttagcattattgggaaaaatcaccgcagccgcagctgcagcctaagcaaggccaggcctgattcctaaagagaccaggtctcacattgggagtggggagccactgagtcaggagcggcaggactgtatctggcaccagctcaagttgtcaaccagagactgggccacgtgtaacgtagagcacaggtgagggtccacaccgacgccagagagcacccctacctcccacactggtgtttgcgttgtaactgggagaaagggcggcctggccccagccggcccctacctgtacgtggggatgatctgcaggctggagtccggctttatctgaaacttcagagtcaccccctcgaacccagggtccactctctcggtgccccggcaggggttcagctgtttccggggccttctctggggtggggccgagggagtccccgggggctgcagacggcggcccttttggctgatcctggtctgtgtgtccttggaatccctgtccagcagcaggcggccctgagtccccagagccatcgggtcccagcaaggccccaggaccggggtgtcctgggcaggggactgacccagcctctccactgtctcttggaggaagcacagggcggtgaccgactcctggcatgcaggccagagggacctggggagaagggcagtggggtcacgttttcttgggtgactcctgggtttagccggccagggggttccaacttgggccggctctttgtgtacccttggacaggctacacaccccacctgaggttcagtcatttctaactctgggtggaaggtttaagagttgcagtaattgcaactcacctcgcccactgtgggcctcccaggcacgcccagccctccacatcaatcaaccccttacggcacccgtagatcacccaggcagggaccgccctaggtgaccgaggcaggatatcaagcctctggctgcaggatcgagaaaaaggttactttttttctttgtgtttcttttagagaccgagcctcactctgtacccccgcctggagtgcaggggcgtgatcaggactcagtgcagcctagaactcctgggctcgaccgatccttccgcctcagcctcccgagtagctgggacttacaggcacgcgccaccacgccgctggcttgccataatatgattacgatttttatcattttcattattattgagttgccctccataacccctggatgatccctggggagtgcctacatcagccccagagacatggaattgcatggcctctgatccctagatgaccccaagtgtctctgggcaccagaacctctttgtaagtttcagtaactattataaaattgccacttctcgataaccccagcaaagagaggtcatgaccccttgatcactgagccaggtggtgaagtgctagcggggtccggggaatggggtttggccttacgcacctctcactgattctgcagcatcctggggtcctcggcttctcctgggagggggatcctcccagccgctccaggttcagacagggcggcgccagaagctttgctggcattgaggagtccgggattggctcggcctccattgcgccccagcccagccccctccctaatttcacccggccctgtcccgctgggcccacccgatgaaacccacctgggaggggcgggacctgtgtggtgggagcgctcttggtagaggatgcgatgagccccagctgagagcgaccagcctcggcggcacctttcctctttctggcttttttcaggtcatccgcgcacccctgcgtggcaagggcggcctggaccccaccaaatccctccgcagctgccggggcggggccttccacgctagccctccccctcggaaatgggggctcccaggcctctgccttggatccccagcggcatcttagatcccagagggaaaagagaaccgggggcccagcacagcagatgcaggtgtggtttgtttttgtttttgttttttttttttttgagacagggcctcactctgtcacccaggctggagtggaatggcctgatcaccgctccactgcagcctaaatcccctgggctcaagtgatcctcccacctcagtctcccgagtagctgggactacaggcacttaccaccactccacgctaatttttactgtttttatagagacgaggtctcgccatgttgcccaggatggtcttaagctcctggcctcaagtgatcctcccatcttggcttcccaaagtgctaggattacaggtgtgagccacctgtagaccccagatctgtcccccaaggacactcaacatgctggggcctgtgttatcgatttattgcagctccaatatgagtccactcctactcaaaccctgattctcaggggcctggggaaggccaccccactaggggccctgtccccaccagagcctggacatgggactctctcccaagcaggggtgttgtccttcacaggggcttccacgtctctcccgggcctgtccgcactctgggcagggctggcacctggctattccctcaatctgggccctggggccatggcaatgtggaatggtccaggtgttcatgtcagtggggcttggggacatggccatccacgtagaagttcctggtgatcttgggcagggtgaattccgctccttccagctccggtgtcagcacaatctggcagcccagccgcgagttctcctggaggaggggggccatgtctagcatgtcgtcttccctagggtggtgacacgggcagtgttagccgagggcaagctagctgggtgggtggggggccagaggtgggggagggaggaagctgactgagcgcagggggtagtggtgggggaggcagctcccattccaggaactggaagtggggaggatggtgggggctgctgaatgctccagggtgaagctgccagctagacagggctgacccactcacctctcctcgggaggaggcaggagatccaggtggtcttcactcacatacacatggcaggtggagcaggccagggaggcttcacaggcccctaggggtgggaagtgaagggggcgcaggtgagtggcagagtcaggaaggggctgctatgcgaatggcgtagaggagtagacctctcttccaccacgtgcctcacgtctccctcctgggcctgcagctccactgtgtgtaccaggcactgtgtcatgtcctcaatgtcctcagctagctgttccccagtgtgtagggtttacaaacggacatctgggaggccccatttcccagggactccctagcaggctgagatgcagaaccattaaggagcagggacttggctgccaggtagctgagaggggaaaggccaggcaggctccccgcagtctgtgagcccttgctgtgaccctatcactgtgctgggctaatgtgtccccacctctccactgctcttggaggatggaccggctgactcagcagtcagtgtggtgggggaaggaatcaggcattaggattttgttttttttttttttgagatggagtcttgttctgttgcccaggctggagtgcagtggcacgatctcggctcactgcaagctctgcctcccgggttcacgccattctcctgcctcagcctcccaagtagctgggactacaggtgcctgccaccacgcctggctaatttttttatatttttttagtagagctggggtttcaccatgttagccaggatggtcttgatctcctgacctcatgatctgcccgcctcagcttcccaaagtgctgggattacaggcgtaagccactgcacccggccaggattttttttttttttttttgagacagggtctcactctgttgcccagcctggagtgccatggctcagtcatagcttactgcctcaacctcccggctcaagcgatcctcccaccccagcctcccgagtagctgggactacatgtgcgcaccaccacacctggctaatttttttttttttttttttttgaggtggagtttcgctctctttgcccaggctggagtgcaatggtatgatctcggctcaatgcaacctctgcctcccaggttcaagtgattctcctgcctcagcctcccaagtagctgggattacaggtgcccaccatcacgcccagctaattttgtatttttagtagagatggggttttgccatgctggccaggctggtcttgaactcctgacctcaggtgatccacctatctcggcctccctaagtgctgggattacaggtgtgagccaccgcacctggccatattttttttttttttttttttttttgtagagacgaggttcaccatgtggcccaggctggtctcaaactcctaagctcaagcaatctgcctgccttggcttcccaaaatgctgggactacaggcatatgccactgcaccagaccaggaattagggttgaaagagacagaacctgaagttttctgctgaccacctgcccttggtcacacccccacatcctctgatcacagagaccggtgcttggggatcatgtccctcctggcctaaaactttccaaagggttttcacactcagaataaaatccaaactccttcacttagtcttgcagttcccccatccccctcattcattcctttgttttcctttgtaatttttttcttagagatggagtcccgctctgttgcccaggctggactgcagtggcgtgatctcggctcactacaagctccgcttcccggattcacgccattctcctgcctccgcctcccagagcagctgggactacaggcgcctgccaccatgcctggctaattttgtttttgtatttttagtagagacagggtttcaccatgttagccaggatggtcttgatctcctgacctcgtgatccgctcgcctcagcctcccaaagtgctgggattacaggcgtgagccaccacaccttgccaggccacttacctctactagcccggcacagtggctcatgtctgtaatcccagcactttgggaggccaaggcaggcagatcaactgtggtcaggagtttgagaccaccctggccaacatggcgaaaccccatctctattaaaaatacaaaaacttagccgggcatggtggcagttgcctgtaatcccagctactcgggaggctaaggcaggagaatcacttgaaccctggaggtagaggttgcagtaagccaagatcatgccattgcagtccagcctgggtgatagagcgagactctgtctcagataaataaatgaacaaataaatctatctcacattccaatccctgtcctagactattggctgctggattccagaacagaactttaggtaggcctttcataacccctcccaacatatcttcccctttaatgataaaatcaggatccctgatatattcatcccaaaagcaaaccctatatattttcttccagacaacccttcccaagttggtcataattatgtatttacctgtgggattattgtccctattagaccgaaatggatgtgagatgacagaggccttatttgttttgtatattgctgcctgacgcgcagtaggtattcatagaaaggcagcacagattagtggctacaatggactggtgagtctagtattgtcactcacttgcccttagaccaggtctacttaacctggggtttagttgcctcatctataatagggaataacagtctctactactcaagttgtcatgaagattcagtcagtgaatatttattaacatggttaaagacatatatatatatatatatatatttttttttttttttttttttttttttttttttgagacagtctcactctgtcgcccaggctggagtgcagtggcgtgatcttggctcactgcaagctccacctcccgggttcatgccattctcctgcctcagcctcccgagtagctgggactacaggcgcccaccaccacgcccacctaattttttgtatttttattagagacggggtttcaccattttagccaggatggtctctatctcctgacctcgtgatccgcccgcctcggcctcccaaagtgctgggattacaggcgtgagccaccgcgcctggccttttttttttgtttgtttgagacagagtcccgctctgtcatgcagcctggagtgcagtggtgccatcttggctcactgcaacctctgcctcccaagttcaagtgattcttgtgcctcagcctcccaagtagctgggattatatgcatgtgccaccacgcccagctaatttttgtgtttcttgtagagacagggtttcgccatgttggccagactagtctcaaactcctgtcctcaagtgagtcgcctgcctcggcctcccaaagtgttgggattacaggcatgagccactgtgcctggacaagaaatttctattattatttttctctcaacaaattatcaaacatctgttacatcttgacaggcaacagataagcatgaataaggacatgggtcaccaatctcactgggggacagatgacaaagtaggaaacaaaacagcctggcattgtggcttgtgcctataatcccagctacttgggaggctgaggtgggaggatcacttgaacccaggagttcaaggctgcagtgaggtatgattgcatcatggcactccagcattggcgacacagcaaggctccgtctcttgaaaaaaaaaaagtgagaagtgctatatatcatatcacactgataagacagagtaactagggcatgggtacttcagctgggctgaggggaatgggattgttagggacatgacatttacactgaggtctgaaggatgagaaagagccagaatgtttgctgggaaagcacttcagacagagggaacagcaaatgtaaaggccccgaagcaggaatgagcttggttgtttgaggaaccacaagaaagccagtgtgggctgggcgcggtggctcatgcctgtaatcccagcattttgggaggctgaggcgggtggatcacctttcaggagtttgagaccagcctggccaatgtggtgaaaccccgtctctactaaaaatacaaaaattagctgggcttggtggtgggcgcctgtaatcccagctagtctggaggctggggcaggagaaacgcttgaacccgggaggtggaggttgcagtgagctgaggtgcagtaagccattgcactccagcctgggcaacaagagtgaaactccatctcaaaacaacaacaacaaaaagaaagccaatgtggctagaatacagggaggaagggggaagagaacacaaaatcctgggagccaggagtcctagtgatctctaataaatgcttaacaaataagagcttggcaacagatgaggccatggtgaggggtttggattttagtccatatttggtgggaaaaagacgtgaagagacacacctaatttgtgggtttttttttttttttttttggacaaatgtataaggacctccttaattccctctgcccggttcctaccttccaggtccaccccgtggcgctgggccaggtgaagaacattgtccccgactctgccactcactgggatccgctggcctgagcggtctacgaacaccacgttcaccctggggacagatggaagtgcgaatgccgaactggatgatgggctcagggcccgggtagaatctagggttaggaagtaggaattgaggcttgacgcacaggtactgaatagggcaaagcagaagggggacctcgagatgaagctacagggcaagatggggaccagaggaattccgtgggatgaggaatgggggacttggccccctgcactcacacgtccccgggccgctccgggccgcccgcgtcctcctctccagccgggcgcgagcctggaaaacacggttcggtgagcggctgcgccgagccccgccccgccggcatctgacggattaacgctgcccgccccgggcgccccaggtacctgtcgcttgaaactttctggttgtccccagcgccaccccctcccccgacccggaagtgcccccaggtctgttccaccaggtgcccctggcagcctgcagtagaaccctggcactcacgcctccccgggccatggaggcggccatgacatgcatcacgtgactcaccgactgagcatgcgccgcgccagggaggcgagggaaagcccataatcaatggaacataagcgcagatgtttgcttagggcctgcggtgaccaggtgggaagagcagggcggaatccatctcaggtaaacccgcggggccatcccagacctcccactcaagcccactgtttgtcccaagaaccagccaactctgatttctttaaaaccatttacttacaaactttaattcagcaaaggtccgtgtggggagactggggtggggtcgggggaatagtccccttggagtggatgtggacccccagagtcaagggagggaagctggtggcccagttggctgggggcaaggcccagggtcacctcaggtcgacaggtcctgctggtgggcgggcccagagtttatcttcatggagtgctggtttctggcactgggctggaaggaggccagctccagggatctggccgggggtgggcaggcagaattcaagaattcatcttcaacaagcgagtgacagcagaggctccgggagatgggcacaatgtccgactcccacagacagacagcaggggactggcagagaaagcccatctctgcacggaggcccgggtaggagggggtggtggggccggttcgccaagatgaaggctttccccttctactgtccccagggtggagatcctgggtagggtggcccaatccctaggccagagctgtttggtccatagtcaagctcccagagcttggcatctgtggctctggccagcagggcctggggcccagcttttaaggcatcagaaggggagggggctgcggcagggaccccgggccccacggctggggtataggccagatgggcaggcaggggcaggagacagccatgcctgcagcaaatgtgggaaaaacagctgtttcaaaccgcaaggtgtggaatggtggcccggacaggccgggccttgaaggaatcagagctgggggctgtccggggtggtttgaaaaataaaacttagaaaaggaaacagaagtcagttgtcaaagttaaaaaaaaaggagacagtctctgtatcttcacgggaggtcagggaaacctccaaggcactcgaaaggccaaaattacaggagcaatgaggcaggagggctccggagagacgggcacagcggaggaggagatggggggagggagggagagcaggccggggcccctctctcttaaggctgcagggtttcagcgtggggagcaagccagagacataatgaggcctccagactcccccacaccccttgggctcctggggctccggctgattggtcagtaaagtctttcagagatttttctattaccgaaagagagaaaatggtttaaaaaaaacacaaaacaaaacatcagaaaacccaaaagcgatttggtgcaggcccttgagttatctctggtgccagccacttagaaaatcctcttccgcttcaggtaggagtccgcgtagtggccgccgaggccctgggagtgctggcccacatagctgccttctgggctgggctcgggcgagggcagcaggtgggcaaagctgcgtttctggccgcccagtggggtctggagacagagggcagggcggggcgggtcaggggccgctggggggccggggcttcccagccctgcatgtccccaccccctgcccgtaccttcagcaggtggctgtgaccattaggcccggggctgaggcccaggagcccttctccggaccccagcggggaagagccgattgcctgggagaaatggagaggtggaacaggtcactccctgggggccagaggaagcacccaccccgcccccctgccactgccccccagccctgagggaaagcgaacagtttcaggttcaaatcttgcttctgctactttctagctataagacctagggccaattgctccattttatttgagcctcggttttctcatctgtcagatggggccagtagcacccacagcctgggctgtagagagaggaagtgacagaaagcccggaatgctggcagtgctaggtgcttgatgcagagtggatggaggacaataggctgttgctactccaccctgagcaagaccaacccctgccaccaccccagctttggcctgggcaccgagggttacagagccccggtggcaggcacccccaaatcctagctgtcccagggggcctgtgcttggccagagaggttcctcaccttactgaggtggctctgcttgaggccagcctgcaggccgctggtgaagtaggaagtgggcgagcctgaatagaagtgagacagggggcccccgccactcccaccgctgctccgttcgccgaagccactgggcgggggggacatctgtagaagaagggccggtggagtgaagcagacaattgtagtacccagccctttgtatacaatcttccctctgcctcccaggttcaagcgattctcctgcctcagcctcccgagtagctgggattacaggcatgcgccaccatgcccagctaattttttgtatttttagtagagacggggtttctccatgttggtcagactggtctcacactcacgacctcaggtgatccgcccacctcggcctcccaaagtgctgggattacaggcgtgagccaccatgcccggcagttctgggctttgcaaagactagctttggctaataggactgaggagagctggcacgtgggtacccgcctcctcttcctcctccaggaacccagggatcatcaccgcacgaatgggcacacagaaactgttccagcctgtggacgccaaatatgtgaggccacatagctcactgagacccaggtgagtgccggggaccgcccactgccccatagagtggcaagaagtaatacaatgcctggcatggtatggtggctcatgcctgtgatcctagcactttgggaggccaaagtgggaggattgcttgagcccaggagtttgaggccacagtgagctatcatggagccactgcactccagcctgggcaacacagtgagatcctgtcttaaaaaaacccacaaagaacacacaaaatacaaggtctgctgttccaggctactaagtcatggcacagcctgtcatgtagtaaaagctgattgctacacatgccataccaggtggctcttaccttgtgtcggctgggtccgtgaggcccaagggctggttcccgtgggtgggagaagagccgccgaggtcccatgtcctgaatgaaagcgggagaagcacattgggttggagtctgtcccagcctcacccctggctgaactccatggcagagctgtcatcagggaagacagtccccaccactctgggaccaggaagaggcaaatttggggctggatgcagcttggcagggatggctgctgtgaaggggggtgccccccatgggcctaagtgtttggagtttcccaggcaagctgggaattcgagctgtgtggactcttgcagttttcctgtgttggcgttagttcctgttgttatttgtttgaaacacagagggggccaaacatcacccaggtgacctgtgggcggccagtttgcaatttctttcttttttttttttaaacggagttttgctcttgttgcccaggctggagtgtaatggcacaatcttggctcaccacaacctccgcctcccaggttcaagtgattctcctgcctcagcctccctagtaactgggattacaggcatgtctaccacacctggctaattttgtatttttagtataaaacataaattatattttatattatatatgaaatatatattttattatatattttataatatataatttctccatgttggtcaggctggtcttgaactcttgacctcaggtgatctgcccgcctcggcctcccaaagtgctgggattataggcatgagccaccgtgcctggcccagtttgcaatttctgacctgccaaggaggttggcatcatagaaggaccaaatctccaggggcacagacaggaatcaaaggtgggagagagggatagaaagggcaagccctgtctctggggagagacagtgtggcctaagtcctcttgggagagaaagacagacgcaggatgacagacagactgagacccaagatcctccagggctcgagaatggacagacaggcaggtggaccggaagcagggggtgatgtgcagacagacgggaaactttaagggcatgaggctgggcgcggtggctcttgcctgtaatcccagtactttgggaggctgaggcgggtggctcacttgaggtcaggagtttgagaccagcctggacaacacaatgagactccgtctctaccacaaatttaaaaattagctgggcatggaggtgcgtgcctgtggtcccagctcctcaggagactgaggtgtgaggatcgcttgagcccaagaggttgaggctgcagtgagctatgatcgcaccactgcactccagccagggcagcagagggagaccctgtctctaaaaaaaaaaaaaaaaaaaagcagagaccatatctggcacgttccctgccgcctccctagcacatggcctggcatagtcaatcctagagaaatatcagtttggagaatgatttggccttaggggacagagagctgcagccaggcactcaccgaggggtagtcgaagctgtagctgtcagacagtcctggttcggggggcaggcgggcgctgctgagggggctgagcaggcgggacttgagctggaaggctttgctgctgctgctgccacctccaggggctggggggttagttggggggccctcagctgggcggcggcttctcccggcgcctccccagccccgggcctccttacccgccaggttgctggccgggagcaggctgtgtaggttcaggtagggattcaggggaatccggtagtccttggggggctcccccagcagtgagacctgtggcgggaaggcaggattcgagagggcccccgggagagggaaccctgcggaacaggaggctggtgtggtgccgcgcgcagggcagggccttaccccagggggcgtcggcagaggcccactgtctttctggaggcctctgaggccagagcctcggagccccacaggggcggggggaggagtgagctgggccgctgggggacccaagcccagggcctcccggtcacccccagcagggccaagcacggatggcagcaggggtggtggcttccctcgccggggcggcagctccgggggcaggccccctcctagggagggaaggaggatttcaggggcccaggctcacaggacccctctccccagggccctccagctcccacctggaccagggcccaggggtcaagagacaaatccatgctggccactgagcagagctcatccctgggccctgagtggagggcacccaactgatggacaagggcgctgggacccagaggttgggtcactcacccgaggccacgtagcagggaaggaaggggaagtggctgggggacaccgtgtgggcagggtctgcgttacctgcaggcagctccccgaggagggggttggctggctgggccccaggctggagggcgcccaggggtgagtctcccaggatgccgggcttctagggacagagcacagacagttgcagatgggggcagggtggcccagggaagcagacaggtgtggcccagagtcttggcagacacaccccaactccagggcacggccgatcctgggcagacaggcacagggttccccagtgcccgccacactccaactctatcactgtcccatcagccatggtgaccgagggtctcctgagctccaggccccagttccctggccaatgattgcagcacagtatcaactgcagccacatggaatgggacagccacacagtgtttcagccacttttagtcacagaaggccagacccacaggctcacatattctgtcagttaccaccagacagacacacctgacttagaatccagggaaccacaccagacaggacggagcatgggtgtatgtctatgtgtgtgtgtgtctgtgtgtgtgtgtgcgtgtatatctgtgtctttgtttctgtgtgcatgagtctgtcttgtgtctatatgtgtgtctgtgtctatgtgtgtgtctttgtcttatgtctttgtgtgtctatgtctctgtgtgtatatttgcatctttgtatgtgtgagtctatatgtatacctgtgtttctaggtgtgcgtgtgtgtgtgtgcacacactgaggggatagacctggagttttttcccaggcatgtctatagagcttccgagcagagtctattcacaaactggtgcccagcagcggcgctcccagcccacacccagtttcaggctgtaaatgggcgtgtccaggtcccctgaccccaccccaggcaccaagtccaggggcgctctcagaatggagggaaagatggcgaaccatcatgagcaattgccagagggggatggggatgtgggtgggaaaggcaggggtttgggggagtcgccctcaccctggttctgcgcccccagggcacagccagaggtccccccaccccaccgatcgcaccagctgtgttgaaaagagcctgtaggggctgtagagcagtgggtgagggggatgcgtgtgttaccttctggccctgggtctgcagggcgagctgcaacagcgccgtggacagggctggcccattgagcagcggcatggctgggggggcacccaggaggcctggagggagacataggaggatgtgtgggggtccctgtgtcctccctgccccacctcacgaaacacagccctgaacccattgatggggcaggaaactgacactctggggccggggggtgggcagtggacttgcccaaaggaagggcctagaaggggcagaggctactccagtgaaggtcagccccctcttgtcagcaccccacctcactgcaggctgctgtgtggccctggtcccggcccccagttgtggacagcagcagcccccgctatgactccatactccccctcggccctactcctggggctcctgtcactgcagccaagatgagcagtttcgggaagtgccgggggcagcgctgcagcccctgttctgcacagtggggcccctgtccagccccaccttaccctgcttcccccccgcactgccatggagcagggggttgagcagcagctggagggacgcggatgggcccaggttgttgagcagctgcaggatgttgggctcggggaggagtcccttcccccgattgagggcctgcaggaaggaacagaagcagctcagagtgccgctggggccctgacatccccatggggctcccatccccaccccgccacctctgcccgcacaggctcaccgtggcctgggcagcgatgagagcggccagcatactgcggccggggggcccaggggcgcagaaggagactcgcaggtggctgccccccagggacaggccgtccgcctgctgctgtgcctcctccgccatctcagccgtctcatactccagcaccgcgaagcccttcagctgcccatcctggccgcacgccagctgccggaggaaggcaggcagtcatgagcatctgggcagcagtgactgcaccaccccgggaagtgacaaccgtaaccagactcagctgccccataagggtgaactccacgccaggcctccactgccctgtgcctcattcctgcatcagctcatctgattttcccaatgaccctgggaggctgcatcatacccatttctcagagaaggcaactgaggcacggagaggtcagcgcacccaaggccacacagctggagggagggcggagctgggagccacctcaccaacaaagccaaggccacgggcggatgcggtggctcacacctgtaatcccagcactttgggaggccgaggcgggcagataacctgaggtcgggagttcgagaccagcctgaccaacatggagaaaccccgtctctactaaaaatacaaaattagccaggcgtggtggcacatgcctgtattcccagctacttgggaggctgaggcagaggcaagagagtcacttgaacctgtgaggcagaggttgcggtgggccgagatcgcgccactgcactccagcctgggcaacaagagcaaaactccatctcaaaaaaaaaaaaaaaaaagagataatcagcaacgggtggggaaggaagggctctcgttccagacagtggccaagccaggtagcagtgctaagggaagtggttgggctgggcaccggcacttgctgaatgcccgggcagcaaaggtgcaggtagcagcccttcacctctgcccacgccctgtgccaaggtctgggcacagatctcccataaccaaacctgtcggcttttgttttgttttgttttttttgagacagagtcttgctctgtcaccccggagtgcagtgatgtgaacttagcttaccgtaacctccacctcctgggttcaagtgattctcctgcctcagcctcctggtagctgggattacaggtgtgcaccaccacgcccagctaatttttgtatttttagtagaaatgaggtttcaccatgtcggcaaggctggtcttgaactcctgacctcaagcgatccgcctgccttggcctcccaaagtgctggattacaggcgtgagccactgtgcccggccataaacacacccatcttagggatgaacagagagagactcagaggggtcacagagtgatcaaggccacacaattcctaagtcgagggactgatgtgtgaacctcaagctgcttcactgtcaagcccaccctccattcagctgggtcacctaacattaaaggtgggctcctcggaggacatcacttcaacgcctgctactcatcagatgctcaacaaatgtttggtgagaccaggcccagtggctcgaatctataatcccagctctttgggaggcaaaggcaggaggatcgtttgagcacaggagtttcagaccagcctgggcaacatagggagaccccatcttcacataattttttttttttttgagggagtctcgctctgttgcccaggctggagtgcggtggcatgatcttggctcactgcaacctccacctccctggttcaatcaattctcctgcctcagcttcccgagtagctgggattaaaggcacctaccaccacgcctggctaattttttttctatttttaatagagacagggtttttgttttttgttttgttttttttgagacggagtctcgctctgccacccagactggaatgcagtagtgggatcttggctcaccacaacctctgtctcccaggttcaggtgattcttctgcctcagcctcccaaatagctgggaccacaggcacatgccaccacacccagctaatttttttttttgtatttttaatggagatagggtttcaccatgttagccaggatggcctcgatctccagacctcgtgatgcacccacctcggcctcccaaagtgctgggattacaggcgtgagccaccgtgccatgagacagggttttaccatgttggccaggctggtttcgaactcctgacctcaagtgatctgcccgccgcagcctcccaaagtgctgggattacaggcatgagccactgtgcccggcctctacataaaattttaaaaatcagctgggcatggtgatgcattcctgtagttccccagctacatgggaggccaaggtaggaggatttcttgaacccaggaggtcgaggccggagtgtactcctccagcctgggtgattgagaacctgtctcaaaaaaaaaaaaaattaagtttagtgaatgttcgagtggaggaatgaatgggcagctgttcacaacaacctgatcatgaagcactgccagccccattttgagatgtggaaacaggctaggagagtacctgtagctggtcatgaccctgtgacctttgatctccacataagaaggtaaggccaggccagcgcagtggctcacacctgtaatctcagcacttggggaggccgaggcaggtgtatcacctgaagtcaggagttcaagaccagcctggccaacacggcgaaaccccatctctattaaaaacacaaaaattagctgggtgtggtgtcaggcgctgtcatcccagctactcgggaggctgaagctggagaatcacttgaacccaggaggcggaggatgcagtgagccaagatcgcgcccctgcactccagactgggtgacagagcaagactctgtcttaaaaaaatataaaataaaataaaagaaaggtgaggccattgtgctaactcatcttctgtcctgagcccgcacaggcggcctggtacatagcaggcctggtacgtagcaggtgtccaagagaaagcagcagaatggatgaatgataagtaaacagagagggggttcccgtggctcatggatactcagtttttgttttttttgtttctttgagacggagtctcgctctgtcgcccaggctggagtgcagcggcacgatctccactaaccgcaaccgcagtcttctgggttcaagcaattctcctgtctcagcctcctgagtagctgagattacaggcgcgtggcgccatgcctggctacctttttttttttgttgtatttttagtagagacgggatttctccatgtttgtcaggctggtctcaaactcctgacctcaggtgatccgtccgtctcggcctccaaagagctggcattacaagcgtgagccactgcgcctggcctgtttttttttttttttttttttctgtttttgagatgcagtgttgctttgtcacccaggctggagtacagtggcgtgatctcagctcactgcaacctccacctcccaggtacaagcgattctcctgcctcagcctcctgagtagctgggattacaggcctgcaccaccacacctggctaattttttttgtatttttagtagagacagggtttcaccatgttggccaggctggtcttgaactcttgacctcaagtgatccacctgcctcggcctctcaaagtgctgggattacatgcatgagccacctcacccagcctgtttcttgttttaaatatagagatggtgtcccactatcttgcccaggctagtcttgaactcctggtctcgagtgatcctcctgcctctgcctcccaacagacacctagtttaaatggggcaccaataccccacttacacgagagggacccactcaagcccacagagctgggggtccgagcccaggactgtctctctgtttttgagataagggtctagctctgttgctcaggctgtagtgtcatggtgctgtggtgcgatcatggctcactgcagcctcggactcccagaatcaggcaatcctcccacctcagcctcctgagtagctgggactacaggcacaccatcatacctatctaatttttgtatagagaggatttcaccatattgcccaggctggtctcgaactcctgggctcgagggatccgcccgcctcagcctcccaaagtgttagggttacaggtgtgagtcactgcacctggccaggcctaccccttttaagcctctgcactggcctccgctcactggcccaagctctggagctaggctgcggtgttctgatcccagctctgccagaccctggctgtttaactctaggcaagttacttgacccctctgtgccttggtatcctcacctgaaaatgggagtgatacctgcctctcagggttgctacaggatgaagcaactgaaggttacgtactcagagtccacagcgagtgctgggggaatgtcccctttgggatctctggggatcaagaccttctgggggctcttagagagtgagtctggcctgttctcgccccactgcacctgttacagggcgaggcacacacacagaagtgcctggcatgtgtggcttgaatgaacaagggactgttttgccaacccattgtgcaagtattgagtccctgcttatggaggagggaaactgcagatcagagagccagtgactggcccgagctcgagggcggggctgggatctggcaaagcctcagtctctgacctcaaggctcaaatagactgtgggctcctctgcagcctcctcaatgcctggtccaggtctgggaccccatgggaggtttgacgagggtaccagcgaatgaggaggtgagtggtgagcaagcctcgagatccatagttacaagagtggccttgcatgcatctgatagagggacagtgaggcctgaggctgcagagggattcaaatcccctggccaggtgtggtggctcacgcatgtaatcccagcactttgggaggatcacctgaggccaggagttcaagactatcctggccaacatggcaaaaccccatctctactaaaaatataaaaattatccaggcatgggggcggggcgcctataatcccagctactctggaggttaaggcaagagaattgcttgaaccaaagaggcggaggttgcagtgaactgagattgtatcactgcactccagcatgggtgacaaagtgagactgtctcaaaaaaaaaaaagaaaaggcagatgactccaaagactctctcaggtgctccgggcctggcacctgctccccaatgctctccacagggctcacctggcagaaggtggggctgtggacagctgacagcgcccggcacagagcgtccacatcgttgaagccaggtggcaggcggtccacacagaggcagcgggagtggagaagggcaggcgtcagttgcccggcatccgtccagtgcacgtagagggtgcgtggtcccagcggcttgcccagcaggtccgacttggcacgggcagccgagtccttcttcatgtactcagcaaagccatagcccttggattggccagtgcgctcactgtagaccaggaagcagcgctccaggctgccgaagggccgcaccagctcctcgaactgctgctgtgtgaggctggggggcaggttggccacacacagcagggcatccgtgggctgcagctgcaccgacagttcacgctcccgcaggcggctctggtggaaagcattgattgcggcctcggcctgctccccattcagcagggtcacgaaggctgcggtgggaggagggcagtgcgaggtcagccgggccctgagggcctgcccctccaccccgccaccctgcaaaccaggtgggacctccaaatgctgggcatctcaggtgcctgctgatctgagcagttgccagccttggcgactcacacaggcgagagcgcctgccattgactctaggctccacgaagcccactccctctcccagccctgcgtccacctgcacccacagcagcgctcaccaactgtgggcctggctctgtcctaagaacgctgtgggtcactcgggtgataccaagggcagtggttaagcccatgctcactggggcccagatttaagccccaagccccaggtggctttgggggtatcagtttcctcatctctcaaatggatataacttaatcatcacaatcaccattttgccagagaggaaacgggcccagagcagcacccctgtgccccgagtaggggagcctggacttgaacccaggcagccggactccagaggcccactctacacactgcccacccctgccacctttccaggccaccagtgcccctgaaccctgctgccacgtgctgccccagatttgcgatccacccagcggccgcaggaagctttgttcaaaacgatcacgccacatccatcttgtggcttctagctgcagggtgcagtgcagcctgtgcgggctcgctgacctcccctcccatctcaccgctgccacccggaccacgccaggcacactccagaggggcctttgcagctgctgtttcttgagcatggaacactgagccccacctcctcacctggttaacctggacccacccaggtagaaaccctgtctctactaaaaatacaaaaattagccgggcatggtggcacatgcctgtaatcccagctactcgggaggctgaagcaggggaatgggctgaacccaggaggcggaggttgcagcgagccgagctcgcgccactgcactccagcctggcgacagagcaagactccatctcaaaaaaaaaaaaaaaaagaccacacaagcaggggtgactggctgagtgaggcaagaggggtaagaagagaatgaacccacggccaaacgttgtcaagaattagctcaatgccaagcgagtggagtaggaagagaatcagcccgatgcccagtgttctccaaggagaacatgaaggctgtcccaagatgacaggatgacaggcagattggggcaacctgccatgttggcctggggggcaatactgggcctgaagctcagagcagcagacagtgagccaggccctcccatcttcagggatggtcactccctgccctggcccgccccatggccccacaaacctgtccctttgtatttgtccacaaaacagtatttgagctcatagtcactgagcaggtcatgtacttcctgtggagatacaagacaaaagacagggagttactggagatggaagggggcaacccagtgccgcttcatagctgccaccagctatgaaggcaggtcaattaccaccccccattttaccaatgaggaaactgaggctcgatgcagtaattttgtcaaggtcattctgctcatacctggcagagatgggattcagaacctagctgcagactgtgctattacccaggcaacatgctcttagagggtatacctttagctggctgggcggggtggctcacgcttataatcccagcattttgggaggccgaggcgggtgaatcacctgaggtcaggagttcgagaccagcctggccaacatggtgaaaccttgtctctactaaaaatacaaaaattagccaggagtggtggcgcacacctgtaatcctagctactcgggaggctgaggtaggagaactgcttgcacccaggaggcagaggttgcagtgtgccactgcactccagcctgggtgacaaagggagacactgtcaacaacaataacaacaaggccgggcgcggtggctcacgcctgtaatcccagcactttgggaggccgaggcgggtggatcacgaggtcaggagatcgagaccatcctggctaacaaggtgaaaccccgtctctactaaaaatacaaaaaaattagccgggcgcggtggcaggcgcctgtattcccagctactcgggaggctgaggcaggagaatggcgtgaacccgggaagcagagcttgcagtgagccgagattgcgccactgcagtccgcagtccagcctgggcgacagagcgagactccgtctcaaaaaaaaaaaaaaaaaaaaaaaaaaataacaacaacaaaaaaaaaaaaaaaaaaagaggccgggctcacgcctgtaattccagcactttggaggctgaggcaggcgggtcacaagatcaagagatcgagaccatcctggccaggaaggtgaaaccccatctctactaaaaatacaaaaatcagctggctgtggtggcgtgcacctgtagtcctagctactcgggagactgaggcaagacaattgcttgaacccgaggggtgaaggttgcagtgagcagacatcaagccactgcactctagcctggcgacagagtgagactccgtctcaaaaaaaaaaaaaaaaaaaaaaagagtatgcctttagggaagccatttaacctgcatgaacctccttttgcaagattcactgtttccaacaactctgtaagtgaagtattaacaaactcatgttgtatatgagaaaacttaggctaggagaagtgaagagatctgctggaggccatgcagttgggcagcgcagccacccatgggtacctgactggggagcccaccttctagtaagccccacgttgtgtgggttcacatgcctcccaatttcctcctgctgataaagctgccctcttccaagccagctcatttatttttcttttttttagagatagtgtcttgttctgtcacctaggctagagtgtagtagcacaatcatagctcactgcagcctcaacctcctaggctcaagtgatcctcccacctcagcctcctgcgtagctgggactacaggcacgcaccaccatgcctggctaatttttaaaaattttttgtagagatgagggtttcactataccgcccaggctagtctcgaacccttgggctcaatacagcctcttgcctcagcctctcaaagtgctgggattaaagggatgagccaccatgcccagcctctcaagccagctttgaaggcaaagtgctggcgcctgctgggaccagacacactgtgcatcttgcaggagagacaatgtgttcccagctgagagactgcagacactgagaggaagacccagaaagaaacctgaccatccttaatgatccctgtcccgatctgtccccaaattcagcccctcccaacatccctggggttccactagccacgtgcccacccggtgtgctggtgggccggagagcagggaatctcagcagcaggaagcgagaacctatttcaccgccatagggcagggcagtatagatgccatttccctgggtccaaagagcattgggaagcgctgccccatgctggccccatgagaagggcactcctagcaggaagattagccacgaggggctccatagaacacaggcctcgcttccttcctgtaggtctgtaggctggtggcagaagaccccattttcccaaattaatcctgaggttttgggggctgagacccaggggctgctgttaacttccggatttatctctgagagcagtgaataaacgcgtgatatggaggggcgtactctccgcagtcctgaaacttctggatgtgaggtcccgccaccctgtggtagagtgggtggagaaaagcatcatccaagcagggggcaactggtggtccaatgtaccagcccattcacaattccccaacaggaccaaagctgtccgcccccttccattccccgcccgcttccatcacttggtgtcgcccaagcctgtggtcgcccctagcaacgccctccctcacttcgcagtcggtttcccctttcatcatcgcccccccacgtcccgctcttggtctctcccgatcccgcgtggatccggtgcttgggcgcccccgccaacgacccccgcgcacctcagcgttggtgtcgcccggttccccccgcgcacgcgcaccgtggtatttcccgccacgctcctacaccgccccccccaatacctggttggtcacgtcccccgggaggccccggatcagtatcttgcggcggttacggaactggcgctcggtgtgttccaggcgtttccggatctcttctggatctagaggcggcagctcttcttccggcgcccggcgctccgcggcatcgccggcttcgacttcggccccagacttagggctcagcgggggccggtgagtaacggacacgtccgccgccatcttgggaaacccggcgccttctgggaccagcgagccggggcggagcggcatagagcggcaacgagggcgcgcccgtcgattggctgggagaaaccccacctccttcccgccccccttgccccgttggctaagccccagcccacctctcaagagttcaagctgcgtctgcgcgccacaggccccgcccccttccgtcgcagcgacgctactcagtggatgtgcacctgggtgggagagacttgcagcgcgggtggaatcaaaccacagattagggagtttgaaggctttattggtgcggaatctgagggcacagccaagcccccgccaactttgatcccggatcccagcgtcactcagctctggacggttcttcccccattgcttctgtcggctgcatagacgtgaggggcagataggtgctctcctccctaacatggtaactgccgctccgttggtgctccctgaagacgtacattaaggccagtacgatagtcaccacgcccagggtcagtaacaccgccacgaagacggggacaaagtgggagctcccagctgtgcagagaaagcgctaagtcaatatgcgtcccttctgtctccaacccccccgccccccggcttaccggtccagacccgcagccccgtgttagctcaccctcaatgtccatcaccacgaccagggtgtatttgcctcgtgagctggacgcttggcactgataagtaccattatgtgttacgttgacgaagaacgggatccccaccggcacctcccggctggagccttccttcaaacaccgcagctcggggtacgggttgcccctggcttggcactgcaggacgtgtctcgttttatctttccatttcaagtgctgggggcatgtggctcggtcaattttgggaccatctgtggaaccaccatgtgtgatcagacacccaacacacccgaggcacagtggtgcagaggagcgtctaatctttccagggcaggggtggagggattaaaggtcagggtgaccgactcacacaggactcgcagctggacgctactgttcctgtgcaagaactcgccgtccacctcgagagtggcactgcagaagaagctgcgtccgtcgtcactctcggtagcatttagctgaagttgagctggctgccccggggccgcggccggaactccgtccagcgtgacctggactcgagccccagccatgcaactcacggtcactgtggacccctcatgggcggtgggctcgctgaggttcacaatgggtcctaggaagcctaaaggcggggcattgcccaggagcttaatgaacaggaccttcctgtgggtcaagccgctccctccgccctcccctttcctctcgggatatccgggccacgctttcggccgttcaagcctcgccctctttccgcgctgtgtccagcttcgggcactcaggcccaacccacgttgcaactgctattggggcaagccaggccccaccttttcggctagtctccgccccctctgccacgcccccagactgctgaggccgcgcccccttcccacgcctcctcttactaaagaccgtcaagttctcccgggcctcccgtctctcgccccctagggtcacgttgcagacgatctcccgggcaccctcctgatccgcgcgcgccgtggctgtggctgtggccgttagcgtgtccccgtggttcatgactgtcgcattcagcatctggtcccccagcgccaggtagacctgggcctctgaggctggaaaaagcccgtctagggtgcagtccaccggccacgacgtttccacctccaagaaccggggggccacgaggcgcgggggggtcacgggcaggactggggagaaaggtgggcatagtacaacccccaggactgtgccttccccaggacaccctcatcccccccagtcaggatatcttgctgactgggtcacccttcttcacaggacacacacacagggccatgaaaacggccttcttcaaagatcccacggctcgggcctcccttccggggccaccttgcccagtggccgggggctttccttcccagaagcctgtgaggtccggggtaccccactctcaggaaccccaaggtcagggcaccgtctaccctggctcagctcgtcacccaccgtctgaagccccttctctcaccaaaggttcggagctggcggggggctgaggtgttcacgaacagtcccagcccctggggctgcatgtccagttctgtgcggcatgagaaaggggctccgtggtcgtctctgctggccagcacagtggcagtgacctccgctggctcctccactgcgggctgccggctcagctcctcctcccagcgaagcagcaccaccgtgaggctggtccggggcgacccatcctccacttggcagcgcagggtgaagttctggcccaccggctgccaaggaggcaggggtgccagctccacacgctccgggagccctgagagaggaggggaggatggcacttagcgggtcctgcaaacccacccactcaccccagggactggggaggagacagggtggtcctgccgagaactgtgagctttgagttaataaacttagagggcttagagctgggccagtcgaagcgtttgctattatcattagcgcagtgattatcatttcctgtgttgtcagataccttgcaaggcgctaaacaaaactttctgttctcaaagatggcacaataaaaaaaaatgaggatggaagggatgaacgtttatgactatgatatgaatattaaaaattcctgtttatggccagacgtggtggctcacgcctgtaatcccagagctttgggaggccggggtgggtggatcaaaaggtcaggattattcagttctctccaatcaggttcagacactcagggctttcctggttcaccagccctgtggcagcctctcaagatactccggcacagtcacaggagacttgacactcccaggctgggtgccctccccagtacacctacaaaacgctgggcctcaggccgggcactgtggctcatgcctgtaatcccagcactttgggaggccaaggtggacggatcacctgagaccaggagttcaagaccagccttgccaacatggtgaaaccccatctctactaaaaatacaaaaattagccaggcatggtagcacgtgcctgtaatcccagctactcaggaggctgaggcacaagaatcgcttgaacccaggaggcaaaatttgcagtgagctgagatagtgccactgcactccagcctggcgacagagagagactctatgtcaaaaaaaaaaaaaaaaaaaaaaaggctgggcaaggtgactcatgcctgtaatcccaccactttgggaggccgagggaggcggatcacttgaggtcaggagtttgagaccaacctggcccatatggcaaaaccctgtctctactaaaaatacaaaaattagccgggcatggtgtcacacgcctgtaatcccagctactaaggaggctaagacaggagaatcacttgaacccaggaggcggaggttgcaatgagctgacatcgcgccattgtactccagcatgggggacaatagcaagactgcgtctcaaagaaaagaaaagtcaaaaagtaggccaggcatggtggctcacgcttataatcccagcactttgggaggccaaggcgggcagatcatttgaggccaggagtttgagaccagcctgggcaacatggtgaaatcctgtccctactaaaaatacaaaaattagctgggcgtgttggcatgcgcctgtaatcccagctactcaggaggctgaggcaggagaatcgcttgaacccggaaggcagaggttgcagtgagccaagattgcgccactgcactctagcctgggggacagagtgagactctgtctcaaaaaaaaaaaaaaagaaaagaaaagaaaaaaaaaagtagccaggcctgcaatcccagctactggagagactgaagtgggaggattgcctgagcccaggagtttgagaccaacctaggcaacatagggagatcctgtctctaaaataaaggtataaaaaagtgtaaatgtaaaacctccatttgcctactgctgactgaaaggggtacccccttttttgcttaagagacaagggtcttgcttttttgcacaggctggagtgcagtggtgcaattatagctcactacagccttgaactcctgggctcaagcgattctcccaccttggtcccccaagtagctgggacttcaggcatgtgccaccatgcccagctaatattttttatttatttttgtagagacggggtgtccctatattgctctgcctggtcttaaatttccggactcaagcaatcctcctgccttggcctcccaaagtgttgggattattgttggggccaggcgcagtggctcacacttgtaatcccagcactttgagaggctgatgtgggcggaacaccccgtctctactaaaaatacaaaacttagctgggcattagctggacctgggaggcagaggtcgcagtgagccgagattgcaccactgcactccagcctgggctacagagtaagagacgccatctcaaaaaaaaaaaaaagcttgttggggccgggcgcagtggcccatgcctgtaatcccagcactttgggaggctgaggtgggcggatcgcctgaggtcaggagttcaagaccagactggccaacatggtgaaatgccatctcaactaaaaatacaaaatttgctgggtgtggtggcgtgcatgtgtaatctcagccactcgggaggctgaggcaggagaatcacttgaacccaggaggcgaaggttgcagtgagccgacatcgtgccactgcactccagcctaggcaaaaagagcgaaactctgtctcaaaaaaaaaaaaaaaatgcttgttggggcccaagttaattgatttcacaactgctgccttggcatgagattgagatgcgtctctatatctctgtctctgtctctgtgtctctgtctctgtctatctttgtatctcacacacaaatgtccaggtctgagctctgggtcagaactgtggtccattctttgcaaactgagggtccccactctcctgagccattggccacttgcccacaccactacccaagaccagtcccacctccggacacgtcgactcactgtacacggtgatgttagaggagcctgttatctgagagccattgcagtacactgagcagaggatccgactgttgccagtcacgttgctgagattgaaggctgcccagcccatgccactggccaccagctcctttgatagggacgtctccaaggcgattttctcagagctgggacaatcagtactgcagttcacaaacagggaccctccagcagagagcacagggttctggggctccacccgcaaaaggaactcctgcccctggacaccttcaggaacatgaagaagtcctggtgtttgtttccttgtcccccaacccacgcatcaacaggccccaccatttaacacctctctccttgtgccgagacagaagggttcctgccttcatggtccagtgggaaaggtagaatccatcagagaccggggagaactcagaaggaggccagaagaggctctgatccagcataggaggaggtgagtcagggaaggcttcctggaagcggggaccattgcagcccgaaactgaaggctaagtaggagttagcaagtgaaagggacaggtgatcctggcagagggaagcacatacgcaaagggcaaatttcaggagttcagatggagcaggaagcatgaggggtgtgtgtgtgtgtgttaggggagagggatggcgtacaagcctatgctggggcctgaccacctgaaggctgaactaaggaaccagaactttctcccgaggatacagagtcagcggccaggtcgcagtgtggcaggatgtgaacagcgttgcgttctattcctctaccctctactgatccccaaaacgcagccctctccagccctccccggcttgactggtctcacctggggtcagcagacagcagaccagcagagtccagcaggccctgggccacaacacggatggtaccatggtggccattctgacagaggaaggtgccttcctgaggtgcccgaagggcaggcaggggaaaaggcggggcctcccactgcgacggaagcacagcggttaagattgcagaagtctggggactgcaccttgcccaggcctgtgggtggaaggggatgctgtggcccttgggggccagggtgggggacccagacggggctctgcaaagtggccagcactgctgagtctcccccagggaatgggctggtcccagttgcactgctggcccccatttgaattcacaggaaatgctaactaaactggtttcttttgttctcagcactgggaagcctgggtgggggggatgaggcatctccttctggctgaacttaggtgggtaggggaatattctgtccccagagaggaagttaatggggaaaactgtaggcaccattgtgtagatgttaaggtgggatttcgaggaaacattaaaaaacaaaaacaaaaacagaaacagaagcagagtcttgctatgttgccccgactggtcttgaactcctggccttaagatggcctcctctcatcttgacctcccaaagtgttgcgattacaggcgtgagccaccacgcctggccacctttgaagatcttgaggatacctccctatctttgaagatcttggggatcccccatcccctgcacaaagagctaaggtaggtgatttggggacagctgagtccctgagccactgtctatccaggattctacttggtttttgtttgtttgttttgagacagagtctcactctgtcacccaggttggagtgcagtggcgggatctcggctcactgcagcctctgcctcccgggttcaaacgattttcctgcctcagcctcccgagtagctgggattacaggcatgtgccaccacgcccggctaatttttgtactttttggtagagacggggtttcaccatgttggccaagctggtctcaaacttctgacctcaagtgagctgcccgccttggcctcccaaagtgttgggattacaggcgtgagccactgcgcccggccttccaggattctacttgtaactggcctttaccccatcctgttgtccccttgcccacccttccaggcagctggtcactgcattccaagggaaggcgccaaggggaccaggtgggacccccacctttgacctgcctctgacctcaggcctctgacctgccttctgggcttcacatctgagctccagagagagaggccttgttgagagccttgatggggccctgcactcacccactttccccagaccttgaggtcacagcacctcctctctcatctagagcacccccaccttcctaagcaggtccctcctctattcctctaccttccgaacaatccatttcccacctggtgttgagagagcagctaaaacccaagtctagtgtatttgtaaacagcagggaccagtagcatgggcctggtgcctgtagtcccagctccttggaaggctgaggtgagaggatcgcttgagcctgggaggtcaaagctgcagtgagtcgagattgtgcccctgcactccagcctgggagacacagtgagaccctgtttccacaaaaaaaaaaaaaaaaaaaaaagatgtcggacttactggctcacgtctgtaatcctagcagcactttgggaggctgaggtaggtggatgacgaggtcaggaaatcgagaccatcctggctaacacagtgaaaccccatctccaccaaaaatataaaaaattagctgggcattgtggcgggcacctgtagtcccagttactcaggaggctgaggcaggagaatcacttgaacccaagaggcggaggttgcagtgagtggagattgtgccgctgcactccagcctgggtgacagagcaagactctgtctcagaaaaacaaacaaacaaacaaacatatatatataatttataatacttacgtaatagtgagaccctgtctctaaaaataaaaaagaaagaaatatttgtaaataagtcatatttcttttttgttttttgaaacagagtctcaccgtgtcgcctaggctggagtgcaggggcacaatctcagctaactgcaatctcagcctcctgggttcaagtgatcctcccacctcagcctccctaggagctgagaccacaggtacacaccactgtgcctggctaattttctgtagagacggctttcaccatattgcccaggttggtcttgaactcctaagcttaagggatctgcctgcctcgacctcccaaagtgctgggattataggcgtgccctgctacacccgccagtaatatttctgataaagaagtatttctgggccaggtgtggtagctcacgcctgtaatcctagcactttgggaggctgaggcgggcagatcacgaggtaaggagatcgagaccatcctggttaacacggtgaaaccccatctctactaaaaatacaaaaaaaaattagccccgtctctactaaaaatacaaaaaaaaatggtggcaggtgcctgtagtcccagctactcgggaggctgaggcaggagaatggcgtgaacccagaaggcggagcttgcagtgagccgagatcgcgccactgcactccatccaggctgggcaacagagtgagactccatctcaaaaaaaaaaaaaaagagtatttctgggccaggcgtggtggctcacacctgtaatcttaacactttgggaggcctagacaggcggatcccttgaggtcgggagttccagaccagcctgggcagcatgccaaaaccctgtctctactaaaaatacaaaaaatcggccaggtgcagtggctcacgcctgtaatcccagcactttgggaggccgaggcgggcggatcacgaggtcaggagatcgagaccatcctggctaacacggtgaaaccccgtctctactaaaaaaaatacaaaaattagctgggcatggtggcgggcgcctgtagtaccagctacttgggaggctgaggcaggagaatagtgtgaacccgggaggcagagcttgcagtgagctgagattgcgccactgcactccagcctgggcgacagagcgagactccatctcgaaaaaaaaaaaaaaagtacaaaaaaatcagccaagcttgatggcacacacctgtagtcccagctactcaggaggctgcagcgggaggattgcttgagcccgggaagtggaggttgcagttagctgagattgtgcccctgcactccagcctgggcgacagagaaaggtcacctacacatgtttaaggggcctctgcacatatctcaagccattgacaagaaagcaagtacagtctggattgcaaacaatgtataatttaagctccagctgattttttttttttttttgagacagggtctcagtctgtcacccaggctggagtgcagtggcatagtctgggctcactgcaacctctgcctcccaggttcaagtgattctcccgcctcaacttcccaagtagctgggattacaggcatgcaccaccacacccagctaattttttgcatttttagtagagacggggtttcaccatgttgaccaggctagtctcaaactcctgacctcaggtgatccgcccgcctcggcctcccaaagtgctaggattacaggcgtgagccaccgcgcctggcctccagctgatttttgacagccacattgttgctataggatcctttttacgtgtgatggtgatggtctctggttctcctcattcccacaaaggttgttgaaccacagcaccagtaacactgagaatgctaagggctctagcccaggctttctcccaggttctctggtgtgcgccctcctggtgacaatgaaattgaagctaattgctttcactggttgagtctctgatcttgagtggctgtgtccacatttcattttttttttttctggtaggaataactacttttctgcatccatgctccatagactctgtccttttcagacatcctgggataaaaagatttggcttttttttttttcttcttcttcctgagacagggtctggctctgtctcccaggctggaatgcagtgacataatcatggctcactgcaaccttgacctcccaggctcaggtgatcctcccacctcagcctccctagtagctgggactataggtgtgtgccactacactcggctaatttttgtattttttctacagaggagcttttgacatattgcccaggctgttctcgaacccctgggctcaagtgatcctcccaactcaacctcccaaagtgctgggattattacaggggtgagccactgtgctgggctttcactcttaggctattaaacaatgaaggtagttattgatcctatctctttcatattcttcttctttttttttttttgagaatgagtcttgctctgtctcccaggctgggctcactgcaatctccacctcccaggttcaagcgattctcctgcctcagcctcctgagtagctgggatcacaggcgtgcgccaccacacccagctaatttttgtatttttattagagacgggggtttcaccatgttggtcaggctggcatattcttctttctaagaactgagagtgagggggctgtattgaatctcttcatgcaccaggaactgagttctgaagatgatcttattattatcagtattttttgagatgggttctcactctgttgcccaggctggagtgaggtggttcagtcttggctcactgcaacctctgccttccaggtccaagcgattctcctgcctcagcctcccaagtagctgggattacaggcgtctgccaccaggcttgagctaccacgcccagccaaaagagcatatattatgtatagaaataataagacgagccaggtgcggtggctcatgcctataatcccaggactttgggaggctgaagcggatggatcacctgaggtcaggagttcgagaccagcctgactaacatgaggaaacccagtctctactaaaaatacaaaaaattagccagacatggtggctcgtgcctgtaatcccagctactcaggaggctgaggccggagaatcacttgaaccttggaggagtttgcagtgagccgaggtcacaccattgcactccagcttgggcaacaagagagaaacaacgtctcaaaaacaaacaaacaaacaaacaaaacccaagaaataataagaccatttggaattactggactaatagaatagttaaggtttcttatagaggcaataaaatgtattttgaaagagctgctaactattgatgctgacagtatttcattcctgtgagtgactcaagcatattataaatagctagtaaaagcctggccaacatggcaactaaaaatacaaaaaattcaccggacgtggtggcgcatgcctgtacttacagctacttggaagactgaggcccaagaaccgactgagccctggaggccgaggttgcagtgagccgagatcatgccactgcactccagccaggatgacagaggagagagactccgtcgcaaaaataaaaataaataaataaataaatacctcgtaaagggaacggagcctgtggggttgagcaaaatgtactagctgtgcctgcagtgagtataacagctttacgattatgaggaaacaattttttcttttctttttttttttttgagattaagtcttgctctgtcgcccaggctggagtgcggtggcacgatctcggctcactacaacctccacctcccaggttcaagtgattctcctgcctcagccacccaagtagctgagataacaggcgcccgccaccacacccagctaatttttgtatttttagtagagacaggggtttcaccatgttggccaggctggtctttaactcctgacctcaggtgattcacccaccttggcctcccaaagagttgggattacaggcatgagctactgcgcccggccccagccaaaatttttaatagcaatgcagaaaaagaagaaaacatgacaggcgcagtggctcatgactgtaattccagcactttgggaggctgaggcgagcagatcacctgaggttaggagttcgagaccagcctggccaacatggcgaaaccccatctctactaaaaatacaaaaattagccaggcgtactggccccacgcctgtaatcccagctactcaggaggctgaggcaggagaatcacttggacccaggaggcagaggttgcagtgagccgacatcgtgccactgcactccagcctgggcgacagagcaaggctccatctcaaaaaaaaaagtcaacaagacaaacaacctagtttcatccacaaatatgttgcaagggggcaaaagacagaaagaggaacccacagaccaaaagagacgtaagaaaactggcctcgagcaaatgcaattggggactttgtttgtatttttatttatttttattttttattttattttattttttgagatggagtttcactcttgttgcccagactggagtgcaatggcacaatctcagctcactgcaacctccgcctcctgggtttaagtgattctcctgcctcagcctcctgagtagctgggattacaggcacacgccaccgcatccggctaatttttgtatttttagtagagatggggttttgccatgttggccatgttggtcttgaactcctgacctcaggtgatccgcctgccttggcctcccaaagtgctgggattacaggcgtgagtcactgtgcccggccctgtatttttatttattttattttttcagaactaaaagagacttacagaaaactggcctcaaccaaacgcaattggggaccttgtttgtatttttatttttttattcagaactaaaaataaatgatctattgggcgggtgtggtggctcatacctgaaagcccagcactttgggaggctgaggtagagggatcatttaagcccgggacttcatcaacctgggtaacatggagaaacttcgcctctacaaaaaatacagaaattagcttaagcgtgggaggcggaggttgtagtgagcagagattgcgccactgcactccagcctggatgacagagcaagactctgtttcaaaactatggggacagtaaataacagatcagcagttgccaggggttagtgagaagagagggatgaacaggcagcgcatgaatgacgtttagcgcagtgaaactactccatgtgatactatattggtgggttcatgccttatacgtttgtccagccccacagaacgtacaacagcaagagtgaaccctcatgtaaagtacagacctcaggagaaaatgatatgtcagtggaggttcatagattttttttttcagacagagtcttgctctgccgctcaggctggagtgcagtggcatgatcttggctcactgcaacctccaccaccacctcctgggttcaagcaattctcttgcctcagcctcctaagtagctgggagtacaggtgcctgccaccatgcctggctagtttttgtatttttagtagagatggggtttcaccatgttgcccaggctggtctcgaactcctgacctcccaaagtgctggaattacaggcatgagtcaccgaggttcatagattctaacacatgtatcactgtggtacaggataggtcagcaagggaggttgtgcagggggatgggagggaggggatataggagaactctgtattttccactcaactttgctgtaaacctaaaactgctctaaacaaattgagtggttatcctactactcaagaggctaaggtgggaggatcacttgagcccaggagtttgagaccaggctgggcagcagagtaagacgctgtgtctacaaaaaattttaaaattagccagatggccaggcatggtggctcacacctgtaatcccagcactttcggaggctgaggtgggtggatcacctgaggtcaggagttcgagaccagcctggccaacatggtgaaatcctgtctcaactaaaaatacaaaaatcagccaggcgtggtggcgggcgcctgtaatcccagctactggggaggctgaagcaggagaatcgcttgaaccctggaggtggaggtcgcactgagcctagaccgtaccattgcactccagcctgggtgacatagtgagactccctctcaaaaaaaaaaaaaaaaaaaaaaaaaaattagccaggtgacgtggcaggagcctatagtcccagctcctacagaggctgaggtgggaggatcacttgcgcctgggaggtcaaggttgccatgggctataatagcaccactgtactccagtgtgggtgacagagcgagacccagtccccagccccacaaaagaagtccttctggggatatttaactgcctttcacaaatgtgtctgacccaccatctcaagtcacacaggctaagtagaaacgctttgccaaacaccagaataacaataatacctttttcttttcttttttcagacagtcttgctctatcgcccaggctggagtgcagtggtgcgatctcagctcaatgcactctgccttccagttcaagcaattctcctgcctcagcctctagagtagctgagattacaggtgtgtgccaccacacctggctaatttttgtatttttttcctcaacaagaacaaacttggtaaataacgatgattgttcatggtttcagactccttttttttttttttttttttaagttccagggtacatgtgcacaatgtggtttgttacataggtatacatgtgccatgttggtttgctgcacccattaactcatcatctacattaggtatttctcctaatgctatccctcccgcaggcccctaccccacaacagaccccggtgtgggtgtgtgttgttccctgccatgtgtccaagtgttctcattgttcagttcccacctatgaatgagaacatgcggtgtttggttttctgtccttgtgatagtttgctgagaatgatggtttccagcttcattcgtgtccctgcaaaagatatgaactcatcctattttatagctgcatagtattccatggtgtatatgtgccacattttcttaatccagtctatcattgatggacatttgggttggttccaagtctttgctattgtgaatagtgccgcaataaacatacgtgtgcatgtgtctttttttatttttttttgagacagagttttgctcttgtcacccaggctggagtgcaatggcttgatcttggctcatggcaacctctgcctcctgggttcaagtgattctcctgcctcagcctcccaagtagctgggattacagacgcctaccacaatgcccagctaatttttgtatttttagtagacaagggttttgccatgttgggcaggctggtctcaaactcctgacctcaactgatccgcccgccttggcctttcaaagtgctgtgctgggattacaggcgtgagccactctatccagccaacttcatttttaaaatttttattttaaaataatataggctaggtgtagtggctcacgcctgtaatcccaacactttgggaggccgaggcgggcagatcacctgaggtcaggagtttgagagcagcctgaccaacaagatgtaaccccgtctctactaaaaatacaaaattagccgagtgtggtggcgtgcgcctgtaatcccagctactccggaggctgaggcaggataatcgcttgaactcaggagggggaggttgcagtgagccgagatagcaccattgcactccagcctggagaacagtgaaactgcctcaaaaataaataaacaaataaataaataaataaaaatacggacaggatctccctatgttgcccaggctggtctcgaactcctggactcaagggatcctcctgcctcagcctcccaaagtgctggggttacaagcaatgagccactgcatccagtcaacaataatattgtatatttatttatttaattattatttttttgagacagagtctttctctgtcacccaggctggagtgcagtggtgcaatctcggctcactgcaatctccgcctcctgggttcatgacattctcctgcctcagcctcccgagtagctgggactacaggcacccgccaccacgcccggctaatttttttgtatttttagtagacggggtttcaccgtgttagccaggatggtctcaatctcctgaccttgtgatcctcgtggcctcccaaagtgctgggattacaggcgtgagctgccgtgcccggccaatattgtatatttattaagcacttgtttgcatgtctttctgctcagcatttcacagacaccacctcatgagctctttacatgagtcctatgagatagcaagtgtgaagctcccataatggaggactaaggcccagagaggtgaagccattagcctgaggtcacacaaatgtgaaagggtgaaactggcagtctaatctatgtggcttgtgaccgccccgaccaaatactttgtgtattcaacaagtagttattggccaggcgcaatggctcacacctgtaatcccagcactttgggaggcggaggcaggtggatcacctgaggtcaggagttcaagaccagcctggccaataaggtgaaacctcaactctactaaaaatacaaaaaattagccaggcatggaggcggtcacctgtagtcccagctactcgggaggctgaggcaggagaatggtgtgaacccaggaggcggagcttgcagtgagcctagatcacgccactgcactccagcctgggcgacagagcaagactctgtctcaaaaagaaaaaaaaaaaaaagttaaacagttgaatccagccacctctgcgctgtctcatgctagctgctgtccacaggagaccagactcccagctaacccagctttcttgaagagggctccaaaaatcacaggctccagcagagaaaacatgagtttattaccagatggtggagatggtgggcctcaagtttggaagctgggggatttaagggctggattagtgcccctacaaatgttgggtccctcaagatcatggttaggctcacggccaagaaagaaaaataagttcacagaggtggggtctctagacaggagtaaggcacacggtgtgggtgaggctgacatccccctcttggtttcatcctggagcagggagcaggaggctccctctgcagccactgcctggtccagtcctcccaggcagggctgccattgtgcctcagcacacgctgaacactgaaggggcctggccttggtacttctcatggactgtcttcagaatgggtatgaggttctcgaaggttgggcgaaaggacgcctctgtctcccagcagttcttcatgagatgatagacctagaaggaaaaaccagggctggtgggggctgccctctccacagcaggatagtggggtcagggaaagacaaaggaagtctcacctcacagggacatttgtcgggccgtggcagcctctcccctcgttccagcaactcagtgagtctcagaactgtcatctgaccctgagcaatgcctatgagctcaaggaatttctacagtataaacaagacaagctcttttcaagaggcaatgaaaggcaggcacggtggctcatgcctgtaatcccagcactttggaaggctgaggtgggtggatcacctgaggtcaggagttcgagaccagcctggccaacatggtgaaaccccatctctactaaaaatacaaaaattagctgggcataatggcaggcgcccgtaatcccagctacttgggaggctgaggcaggaggatcgtctgaacctgggaggcggaggttgcagtgagccgagattgtgccattgcactccagcctgggatacaagtgtgaaactccatctcaaaaaagaaaaagaaatcactctgcaacttcatgaaatcgactgcatgggttccaatcccacctcttacacttctcagctgtgtgactttgaatttgagttcacttctctgggcctgttttctcatccgtaaaatagggtaataacatctgccacctgggattactgtgaacgttaaactaatattcatagagtaagcgtgagtcaggtgtttgccgttattattaagcctcacagcagattgttcttaccgtccagaattttttttttgagacagtctctcgctctttcacccaggctggagtgcagtggcatgatctcggctcactgcaaccttcgcctaccgggttcaagcaattctccctgcctcagccgcctgagtagctgggattacaggcacctgccaccacgcccggctaatttttgtatttttagtagagacggggtttcaccatgttggccaggctggtctcgatctcctgacctcgtgatctgcccgcctcggcctcccaaagtgctgcgattacaggtgtcagccaccgcgcccggcctatgcctttctttcctttcttttctttctctctctctccgtcctgtcctgtcttagacggagtctcgctctgtcacccagctggagtgcagtcgggagatctcggctcactgcaagctccgcctcccgggttcatgccattctcctgcctcagtctcctgagtagctgggactacaggcgcccgccaccacgcctggctaattttttttgtatttttagtagagacgggtttcaccgtgttagccaggttggtctcgatctcctgacctcgtgatccgcccgcctcggcctcccaaagtgctgggattacaggcttgagccaccgcgcctggcccagcctatgcctttctaattgctctagcaaactcccggtggggctgcgggcctggctctcaccgtgggggggctctggctggagtcacagtgcgtcagcagctcatacagggtcaccccgaaggaccagacatctgacgcatagtagaacttatactccttcaggcactctggggcatacctagggggaggggggcactcaggccacggggggctgcactgagggcttggggatcagaccaggctgaagccctcacctgagactgaaggaccctctgggctcagttgggacccacccttaagagcgcagcctgagcggggtgatatgctcattggctaggccgctcattggctaggccgggttaaccccgcccaccaggccaagccgcactctatacaccgccccttgcctccataggccccacccccgcaccgctaggccccgccgcgcttcactgggatcatgccctatcatgatacccagcatccgtctactccaccctgcctgttccaagtgaccccagcaccccctcagactgcaccccgcctggtcaccagaacacggggctgtccccatcctcgcgcacgcggtagtactcgtggccttcgggcacggccttggctaggccaaagtccccgatcttgaccagcctgtcgttgtccagcagcacgttgcgcgcggctaggtctcggtggatgtagtgctgcgcgtgcagataggccatgccctggggacggggcagggctcgtgagtttcagtggggcggggttcggccgggggcggcggcaggacctgagcagccaggagggctgggggacagtcaggtcaggccggtggctacccggccgctggagagggccggatggcacgtggcaccaagcaaaaggaggctgagccagaaagcagggacggggctagacgagcaaagctgggcaggagggcgagttgggaggggccgagccggctgtgcgtggtcccttgggaggagggggtgtggccaagcaagccaaacagttcggaggtcagtgcaaggacaagacagcctgggcaaacgagcaggggcggagcgtgagagcagactgcaccggatcgctcaggccagcccaagctgaagaggaaggggcaagctccagaagcaggggcggggccgaccaacctcgcagatctgctgggcgaagagcagcagctgggccagcccgatgctgtgccggggcaggtagtctcggaggctgcccaggggcacgtactccatgaccagctgcagcgacttctcgcctgccgcggagaggggcggccccggtgggggacgatagagggcgggccggggaccgcctaccttgagcccagcagagcccctccaaggtcgggagggaaggccaagacccgcgcacactagacccagttctcaggtgggatggacccatccagaaccccattctcacttgagggagctgctggtggctcccgtccatcctggccccagcaggtagcaccccccagatgggaaggaggcagcccagccacgctcacccagatgccaagaaccgcgtactgcagcctggggttgagagtctctaattggctaggccagactggccccgcccacaaggccacacccacgctctaaccacgccccctcaagtctctaggactcgccgggtcccgcccaccttggtcctcgcagcagcccttgtacttgatgatgtgctcgtggtagagcgtgcgcagaatgtcaatctcctgcttccagcccgagcggtgctgggggccgcagtctgccttgagggctttcaccgccaccatctcgccagtgccgtcgttggtcggatcgtagcagtacaagctgaccttgccgaagtgaccctggtcgggagcgcacgagggtcagctccacctccccaatccctgcaccactccccaacccccgatttcccgggccactcctccaggcagatcctttcggaataccccaggccccgcctactccgctctattaagactccttggcacctaggcctccctcaaagcagagggtcccacccacatctcctgagaatcaccttaggtaggaatttatcctcaacccccaaactccttcccgaccaggcgggccttttagcagctcaggcccgtccctcacctcgcccagatctcggatctttttcaaatagcgcttgtggaaaaccgtagggtccgacgccggtgagtccgggttcacagtcaagacgtcagcaagatctggaagagttgcggtgggtaaaggcctgaccccgatcctttccccagcaggcccacacttgggagtcacaaagccagccacagctaccccaggatccgattctagaggtaagaaaactttttcctgcaacagctgaaagagtccacttattgtacaaaatgatgcagagttggctgcatcaaaactgacacctgtttgggaggccgaggcgggaagatcacttgagcccgggagttcaagaccagcctggacaacatggtgaaaccccctctctacaaaaaagttaaaaaaaaaaattagccaggtgtggtggtgcatgcctgtggtcccagctactcaggaggctgaggtaggaggatcgtttgagcccaggagttttgaggctgcagtgagtctgggccacagagagacactgtctttaaaaaaaaaaaaaagaaagaaagaaagaaaaagaaaaaacagaaaaacctgacatctggaagttccgagattgggtagagggcacagatatttcatagagaaaagagaaaaactggccaggcgtggtggctcacacctgtaatcccagcactttgggaggccgaggcaggaggatccctagagcccaggagtctcaggctgcagtgagccatgatcgtgcctctgaataaccaccacactcctgcctgggcaacacagcaagacctagtctttaaaacaaaaaagagaaagaaaaatgtgatatgaccagttgaaaatggcatattaggccgggcgtggtggctcacgcctgtaatcccaacactttgggaggctgaggagggtggatcacctgaggtcaggagtttgagaccagcctagccaacacagtgaaaccccgtctctactaaaaatacaaaaattagctgggtgtggtggtggacgcctgtaatcccagctactcgggaggctgaggcaggagaattgctcgaacccaggaggcggaggttgcagtgggccgagatcgtgccattgcactccagcctgtgcaacaagagcaaaactccatctcaaaaaaaaaaaaaagaaagaaagaaaaaaaaaaagaaaataggtcaggcgcagtggctcatgcctgtaatcccagcactttgggaggccgaggcgggtggatcacgaggtcaagagactgagaccatcctggccaacatggtgaattcccgtctctactaaaaatacaaaaattagcccggcgtggtggtgggcgcctgtagtcccagctacccaggaggctgaggcaggacaattacttgaacctgggagacggaggttgcagtgagccaagattgcaccactgcactccagcctggcaacagagtgagactccgtctcaaaaaaaagaaaaaagagcatattaattttttaaagagaacaatacaaaacttttttaaaaagaaaaaaaaaactgcagtggtctaattctctaatccaaagaagttgtgtctctccccagacaaaacattaaggaggccaggcgcagtggctcacgcctgtaatcccagcaatttgggaggctgaagcagatagatcatttgaggtctagagtttgagaccagcctggccaacatggcaaaaccccacctctactaaaaatacaaaaattagccgggcatggtggcacacgcttgtaatcccagctacttgggaggctgaggtgggaggattgcttgaacctgggaggtggaggttgcagtgagccaagatcacgtcactgcgctccaggctgggtgacagagcaagattccattgcaaataaataaataaatacattaatgagagctcagggcagccaggcagggcatgcttatgaatgccactgcaagaaattggcacacaccctgaaccactgtgcagagacctctcgtgcgctataggcatacagcagggatcccagccccgtcccacttccccagggtcccagcactgggatggagctcactgtggggctgcagccgggtgaggtcacgcaggatggtgcggaatgatggcctctgggttggctcataggtcagacactggctggtgagtgtggccagctgtgggcaggagggctcgggcagccggtgctgcctctggtagaaatgctccttctgttgggaaagggacccagaggagtcaacatcctcccctcgcccccaacccgttccccaagaggcagagtcaagtccccagagtggaccgccaggtgcccgctcttatcagttccattatacagatgaggcaactgaggctccacaaagtgggaggacgtgctcacagccgtagaaccaggactgggacccaggtccagtgattatgcagagctggagtgtcacagtcagcctcctgccccaagcttccctcctgcccctcctgtagaccacagctccttaatacactgaagcctcagcctttgcacaggccatgcactctgcctaggctgcccttcctagccaggcttgttggcataattctacacttagataaaacctcttctggggccgggcactgtggctcatgcctgtaatcccagcactttgggaggccgaggtgggcggatcacctgaggtcaggagtttgagaccagcctgaccaatataatgaaaccccatctctacaaaaaatacaaaaattagccgggtgtggtggcatgtgcctgtaatcccccctactcgggaggctgagacaggagaatcgcttgaacccaggaggcagaggttgcagtgagctgagatcacgccattgcattccagcctgggcaattagagtggaacttcgtctcaaaataaaaccaccacactcatgaacctcctttgggaagccttgtctgaccccactgctgggtgaggcgcatcctcagcccttcttccccactctgcagcctgggcgtctcccatcgctgccctggtcactctgcctaaaactgaaatcaagtctcttacttgccttctgtgtgccaggcacaagtgacttccacaaggacctaaaaaggctgggactacattgagccccagcgagtggcccacctgctggtagcccagagagacttgaagtcacgaggccagaagggatgcagctttgagctctgattctgtcctctggatttcttggaggggcccccactgcggggagggcccaagggtctcctagacatacctcggagggactgcggctctgcagaggggcctctccgtcaaagcagatctccaggagggtggcgccaaacccccacttgtccatggcggtgcttaggctgttggccccacctggtaggcattcgggggccagccaggggatcctctccacccgctctgggaggccaaggtcagaggtcaccaagggtgaaaggagcaggggaagccccccactgtgcccaggtcccctcaggtactcaccctccctggagagggcgcccaggcccacgccaggatcactcagcttgatgaaggggctggtgccctctgccaaccccagccgggccagcaggatgttccggccacacacattaccatgaaccaggttcttgttctcctgaggtgggcaggagagggggtgtggccactcaggagaggcacagacgccaaccccaaacctggtccccatagggacagccaatgtgaaaaggacaactgtgactatcactgggtttctttctgttttgttttttggggggttatttttttcttgttttttttttttttttttttttttaagacagggtctcactctgtctctcaggttggagtatagtggcacgaacatagctcactgcagcttcaaactcctgggctcaagccttccaagtagcgagaattacaggtgcacatcaccacagcctagctgattcttaaatttttggtggagatggggtctagctatgctgctgcccaggctggggtgcagtggtgtgatcatagcttactacggcctcaaattcctgagctcaggtgatcctcccacctcaacttcctgagtacctcggcctacaggtgcaagttaccacattggctaattttttttgtatttttagtagaggcaaggttttgccatactggccaggctggtctcaaactcctgacctcaggtgatccacccgccttggcctcccaaactgctgggattacaggtatgagccaccacacctggctatttgtttatttttaaaagatggggccagctgggcgtggtggctcacgcctggaatcccagcactttgggaggctgaggcggatggatcacgaggtcagaagttcgagaccagcctgaccaacatggtgaaaccccatctctactaaaaatacaaaaattagctgggcgtgatggcaggagcctataatcccagctacttgggaggctgaggcgggagaatcatttgaacccgggaggcgaaggttgcagtgagccgagatcatgccattgcactccagcctgggtgacagggcgaaactccacctaaaacaaaacaaacaaaaaagatggggtctcgccctgttgcccaggctggtctcgaactcctgggctcctggccctccctgaccgacccaggccccacacacaggccacacaccaggtagctgagggcgctggccagctgctgggccaccaccatcttccaagccatgggcacatggccccgctccctccgcagccacacatccaggggtccgtgctccacgtactctgtcaccatgatatctgtaaagacacagctgctctggggcaacctgcctgcttctgccctctggatggcggggaattgggggagacgccagggagggacttggcatgtggctggggaggtgtcagggcagaggtgtgggtggagtttggtctgggttgaaagtgagtttggggagagaagaaatgcggaatgcagcagaggcagcggtggatgagggcattggggtccaagtgggatggggcacggaagaagttgaagttcaagagagaaaggtgggctgggcgtagtggctcacgcctgtaatcccagcactttgggaggctgaggcaggtggatcacctgaggtcaggagttcaagggcagcctgcccaacatgatgaaactccatcactactaaaaaaaaaaatacagccgggcgcggtggctcacgcctgtaatcccagcactttgggaggctgaggcgggcggatcacaagttcaggagttcgagaccagcctggtcaatatggtgaaaccccaactctactaaaaatacaaaaaaattacagtgaaaccccatctctactaaaaagacaaaaaaattagccaggcatggtggtgggcgccggtagtcccagctacttgggaggctgaggcagaagaatggtgggagacggagcttgcagtgagccgagatcacgtcattgcactccagcctgggcgatagagcaagactccatctcaaaaagaagaaaaaaaaaaaaattagctgggcatggtggcacatgcctgtaatcccagctattcgggaggctgaggcaggagaattgcttgaacccgggaggcggaggttgcagtgagccgagatcacgccactgtattccagcctgggtgacacagtgagactccgtctcaaaaaaattaaaaaaaaaaagagataaaggtggcagggtacagtggctcatgcctgcaatcctgtcactttgggaggctgaggcaggaagatcccttgagcccaggagtttgagatcagcctaagcaacatagtgagaccccatctctacaaaaaatttttaaaaatcagccgggtgtgatagcacacgcctgtcatcccaggtgctcaagaggctgaggcggaaggatcgcttgagcccgggaggtcgaggcttcagtgagccatgatggcaccactgcattgcagccggggcaacagagggagaccctagtctcacaaaaaaagagataaaggtgagcctacaaagtaagcaactagggatgggggggatgggcatggataagcagaggctaggggcttgaggttggggtgtaggagatgtttgggtaccagagtagtcagagggatgtgggtcagggtgtcggccagggtccaggggaaagtgggggagatgcacacacacacacacacaggggggttgagggatgggtgggtctagggttgttctgtacaagggctttattttttatttatttattatattttttgagacagagtctcgccctgtcgcccaggctggagtgcagtggtacaatcatggctcactgcagccttgaactcctgggctcaagtgatccttccattccagcctcacaagtagctaggactacaggcataggtcaccatgcctggccctgatttttaaattttttgtaaagatagggtctggacatgttacccaggctggtcttgaactcctgggtttaagcgatcctcccacctctgcctcccaaagtgctgggataggtgtgagccaccacacctagcctatacaaggagttttgagctacctgcagaggaaaggaagaggtggggttaggcagggttggatgtgcaggggctgaggcctaggagaatcagcacacatcagcactggagtctgcctgaggccatagtgctgatggggccaggagcagatgggggctggactgtagaggttgtttgggaggttgatggaagtggggatgtagttgggaatcagggtgggggttgagactgagggcaggtgagggtcgacgtgttgggatgtaagttatgggctggaatatcgttaggggttggggtctaggttgaaggtcaaggtgtagcccgggatcagagtacaggtgagagttgagaaataggcataggttggggtgtaggtcgagggttggggtacagatcagggagtgggtataagtcaggggtggcctgccaaagggggatgggtatggcgggacccactcactttcagggccgcgcacacagacgccatgcacgaaggccaggtgcgtgtgggagacctggctcatgaggctggctgtctcgtagaaggcctgtggggaccgggcaggtcaggtggctgcaaagccgacccctcccatcccacctcctccacggacacacccctcccatcccacctcctccacagacacacccctcccatcccacctcctccggccacctcctccacagacacacccccaggcctggccctgcccactcaccagggcgatgtcatggtgactagggtccagcactttgagcaccactcgtagctcctgcccacggtccctgccaggcacgagggggtcctcgtcatccatcttgccctcctcagggtccccgctgccctccactcgcaggcggccctcatacacgttggtccttgtgccctggcccaagtgggacagctgcgggatcatgtggcacagaataccgccatggtgaaagttagcagctgatctcccagggcccccagcacccacatccccaggggccctgcccttgccccgggccccttccctgcacccacctgggtgatctccttctggtcaacccggtggaagctgagctggctgaggttgagtgtcctggggctggcccgagccccccgcatgatgatgagattggaggtttctgggggcaggcatcaagtcatggagggcgggcctgggggagagatgccacatcccacccagaggtccccctatcatcgtacctcctggttggggcaggcaacagcgacgcagagagaagcagtcatccccggccctcagcaagcagccctgcaaggcagccccaagttcccgaacgctggggaaggaccggccccagccctccagcacgaaggccccgtcctgctgctcaatggggaactttcggagccgcaagctctgcatgccgtctggtgcctggcaggaggtggcagaggtgggagcagtaagcaggggaccaggcagggaacgtgtccagccccagccccagcccccagccctgggctcacctggctacgctgggccactgtgaggatcaggcggtaggggtggctggtgctccagtgaatgaggtacaggccgtcctcgggccgcagcttggcctgcacaaatggctccctggaaggtggtccagggggactatcaggccacctggggccactctggacccatacccgggaacaatgacactcattacctacttagagggcacacacacagctaggacaagtgtcagacacagccactcttgtggggacactaactctggacacacagccacttacatggagacacaatgcagcagcaggcacacacctgcttttttgtttatttgtttgtattttttagacggattttccctcgtcacccaggctggaatgcaatggcgtgatctcagcttattgcaacctctgcccacctgggttcaagcaattctcttgcctcaacacctcaacctcccgagtagctgggattacaggtccctgccaccatgcccagctaatttttatatttttagtacagagggggtttcaccatgttagccagcctggtctcaaattcctgacctcagctgatctgccagcctcagcctcccaaagtgctgggattacaggcatgagccactgtgcccggctacctgatctctcttttttttttttttttttttgagacagggtcttgctctgttgcccaggctggagtgcagcggtgcaatcttggctcacttcagcctggacctcccaggctcaagagattctcccacctcagcctcctgaggagccaggattacaggtgtgcccagctaatttttgtgttttctgtagttaaaagaccttgctacattgcccaggctgctcttgaactcctgggctcaagtgattctcccacctcggcctcctaaagcgctgggattacaggtgtgagccaccacacccagcctactcctactcttgtacttgacgccagacgggccctgacaaggtgacacacactccaagattggaaacagccatcaggagccggatgggcacacacccagccatgaccatcgccactcacaagggtgacacacggtggatggccaatcacacaagcaaaggacaacgatcccagacacaactaatcacccaatatgacagggcaacataggggccagggcatcccagacacagaggtgacacaaacatgcactataaagtgtcatggtcacataggtccagacacctacatgtgcagtggctgacacacgtggtccccaaacacctgtctgtacgggggcagcacacatatagccttgacagcaggcacggccacaggcctcacaaggtgaaatggccacttccccctcccctggcatcacaggtaggacaagggacagagagtcacagggccagtgaccagacaaagagacagtcacaaatcacgacttggcagcacacaggacagccacacactcccctgcacctgatgatgacataagtaccgacaacttcacgccctcaggcccacaagtcacacacaggaccccgctgagatggtgactcacaagttaccagcacaggcagccgcctgcagaggtggaagcatccaacatacgcctgaatggtcaccagcgtcagggtaacacacagtcccatgaaaatcaccagttctgtgcaatgacaacctcaacacacaatgacagtcatggccgggcgtggtggctcatgcctgtaataccagcactttgggaggccgaggcgggtggatcacctgaggtcaggagttcaagactaggttggccaatctgatgaaaccccatctctacaaaaatacaaaaattagcctggcatggtggcgagtgcctgtagtcccaggtagtcagttgggaggctgaggcaggagaatcgcttgaacccgggaggcggaggctgcagtgagctgagatcatgccactgcactccagtttgggcgacaaaaaataaaaaaaaaataagacgtgcacctacacacacaccctgcacagcccctagggctcacagtctagttggcacccttggcggtggcccccagcgccccccacccagcactcacagcaggggtccgtggatcccatcccggatgctcatcaccagccgtgggggagccacctcgtggcacaggtagtggctggagtcggccgtcaggcggaaatagccgtccaccagcgacacgaaggacagcgccgcagcccgggaaggcaagctcagctcctgccagccaggggcgcatcaggtgggtgtcctcccaggccatgatgggccctagcccagcccctaccctgggcctcaccaggcacttgttgtcctgccggtggatgctgacacagtgctctttcagcaccacgtgggtgatgtcccggaagtcacagaagtaggcccacagtggctcccgcggcctgtctgccggctggccgactgccttgtgagccttggccttcttcccaaacaggctggcttgggggttcctgccactgctgccactagaaccctgaacacccagcaagtggggcagaggatggagagggcaatgcccgtttatacctcctgcactttcccctggggagagactggagccagaagggccaggcaccaacctaggttgacctcccaagtcccagtgtcacaggtgggatggggacccaccccaaaatcatacacatgctggaagccggacccttagggaaggcagagagaagaatcctgaccccctcacacccaggtgccagtccccagatgaaggggttccctggaggtgcagaccccagaaataaggtccccagggggtaagcagatggaggaccttctccaagaaactggccctagcggacaggtgccccagagccatgtggggagagggctcaggtcagccaccctcagaggctagggtcaaggatgaacacagaaacccaccccagcccaacctgaacccccagggcggaaggggcgccttgctcacctcctccttgttcacctcctcctctactggccaccactggatgccaccagtgcctgtcaccagcacctcgtgggttgggggcccagcagcagactcagggccagggtctgtaggggccaccccactgtcccggatgtagcagggctccccctcggcctgggccagcagcctcaggtggcacacgggcacacgctctgtgccgaagcggggtgccagccgctcgagtgtggctaggtatttgaccatgaccatctgctgggagagtcggcccggctggaagtcccgcaggaacctgcggaagacgttccgaaggcgcagccgggtcagggcgctgtgctgccggatatgccggcggaaggagcgcgggatgcagtccttgaagctggggggaaacacagtgaggggctggtcagggacctgggttgcaggcccagctgggtgacacagggcaagtggcttaacctctttgagcctcagctgcctcatctggaaaacaggcacactagccaggtgtggtgacttgagcctgtagtctcagctacttgggaagccaaggcggaaggatcgcttgaggtcaggagttcgagaccagcctggccaacatgatgaaactcagtctgtctctactaaaaatacaaaaattagctgggcttgatggtgggcacctgtaatcccagctactcaggaggctgaggaaggagaatctcttgaacctgggacgcagaggttgcagtgagccaagattgcgccactgtactccagcctaggtgacagagagagactccggctcagaaaaaaaaaaaagtagaggcacggcaatatgcaaagtctaccctggctcccagatgctcaggacatttccccctgcctacacagcgtccccaccccattcccagacacctggtcttcttggccacctcctccagggggatgccatggcggagagcgaggtgacagaggtgcagaaaggccatgcccaggctctcattcttaaagtggtggatctcctcctcggtcgacagctcccacagtgatgccacgtcattcacaaactcatgcttgccctgggaacaggaaattgagcagaaagggaggtgtgagaatgcgttcctctctagcccagaggtatccaatcttctggctaccctggaccacactggaagaagtgtcttgggccctacataaaatacactaacactaatgatagctgatgagctaaaaaaaaaaaaaaaaaaagaatatcgcaagccgggcatggtggctcacgcctataatcccagcactttgggaggccaaggcgggcgggtcacctgaggtcaggagtttgagaccagcctgaccaacatggagaaaactcgcctatactaaaaatacaaaattagccaggtgtggtggcgcatgtctgtaatcccagctactccggaggctgaggcaggagaatcacttgaacctgggaggcagaggttgcagtgagctgagatcatgacattgcactccagcctgagcaacaagaatgaaactctgtctcaaaaaaaaaaaaaaatcacagcaaaatctcagaatattttaagatagtttatgaatttgtgttgggcttcattcaaagctgtcctgggcagcatgcagtccgcaggccaggggttggacaagcttactctagccagagaactctaatttcctgcgtcttaccaccttgaggaggggagagaccaccatttactggaaaggccaaatacacagcatacacccctcctcttgtcaatcttgtgcctgtggcagacattactaatcaatcacagcactctatccccttcaacctgaactcttggctgggcatggtggctcacacctataatcccacaatttaggaggctgaggcaggtgaatcacttgaggtcaggagtttgagaccagcctggccaacatggtgaaaccccgtctttactaaaaatagaaaaattagcctggggtggtggcgggcttctgtaatctcagttacttgggaggctgaggtggaagaatcgcttcaacctgggaggtggaagttgcagtgagctgagatcacgccactgcactccagcctgggccacagagcaagactccatttcaaaaaaaaaagatcggctgggagcggtggctcacgcctgtaatcccagcactttgggaggccgaggcgggcagatcacgaggtcaggagatggagaccatcctagctaacactgtgaaaccccgtctccactaaaaatacaaaaaattagctgggcatggtggcgggcgcctgtagtcccagctacttgggaggctgaggcaggaaaatgacgggaacctgggaggcggagcttgcagtgagccgagatcacatcactgcacttcagcctgggcgacagagcaagactccgtctcaaaaaaaaaaaaaagatccccagatagcatgagttgaaacctattagctatattgaatcagggagggaaatgggggctcctcaactgcccctaagtctcccacaaatagtcttgccaccccagccctgctcatacctgctcaaagaggtactcaaatgaggctgggtccaggagttgcatcccctgtgctgtctgatctgaggatgcctcggttcctgggggcccacaacggtacacagccggttcccgaggattcatgccatgccagttccggaaataaaacctgcaggaaggagggacgcagctggggcttagcacagagtcagaccagcttcagcacaggaggggacgagctttgcaaaggtctccacccaccttatgcggaaatatagcatcaggcttgcatctctggggatctctaggatgtggtttgggggcaaccagacttgggcctgagcatcgaagagggcaaagagattgaagcaaggaggagtgatacctggatcaggtgagaaacgaggtcaggagtcacgtcatttgctaccgtcagccccaaagaccccccagacccaatgtctgccttcacactccctctgaggccccctcccccacctgcagcttcagtctcacgttgcccctgggcagaggacagtgcgtatgttgcccatgctgtggcctcacaggaggactacatttcccagcctcccttgcagctaggatggagccaattgcactgctggtttctggccaaagggctgggtacatttccaagcctggaaataaattctcttgccaccttcaccacccgaggtatgatgaaggcttcttgtgacagatggtgaagctgtaagacagaggtgaaccatccaacctgtacttgattttaagtaaaactttttttttttttttgagatggagtcttgctgttgcccaggctggagagcagtgacacgatcttggctcgctgcaacttccgcctcctgggttcaagtgattctcctgtctcagcctcctgagttgctgggattacaggtgtgcgccaccaaccccggctagtttttgtatttttagaagagacgaggtttcgccatgttggccaggctggtctcaaactcctgacctcaggtgatctgcccaccttggccccccaaagtgctgagattacaggcatgagccactgtgctcggccgattttaggtaaaccttgattaagatttggggggattgcttattcctgcagcaaaactaatcctagcctgacccacataactctacaaactgctgcaattgtctggcgtctccctgaactccagccccaaagaaacatccagtcacctcctggctgtctccccctggacatcacaggcccccccttagatatggcttgttccaaacaacatatcttatctgtggttggcaaactccaaccttcccttcctctgcccttttttttttaagggtcagggtctttctttgccacccaggttgcagtgcagtggtgcaatcctagctcactgcagcctcaacctccagggctcaagcgatcctcccacctcaatctctggagttgatgggattatggctatgagccagggtgtgtggcttctgcccagttcttcaaaccaggaacttggtccttatcttcaacctctcccacctgctccaaaacagatcggtcaccaagacctgctcttcctgcaccctccatgtcctggggctccatccaccaccttcaaatgcaaacctcaaccccaatccagtctccagacttgctgtaatttcccacaccagctacccagggtatctttcttctactgatgtcatttaaaaattgtacctgtcggccgggcgcagtggctcacgcctataatcccagcactttgggaggctgaggtgggcagaccacgaggtcaggagatcaagaccatcttggctaacatggtgaaaccccgtctctactaaaaaatacaaaaaattagccaggcatggtggcggatgcctgtagtcccagctacttgggaggctgaggcaagagaatggtgtgaattcaggaggtggaacttgcagtgagccgagattgcgccactgcactccagcctgggcgacagagcgagactctgtctcaaacaacacaacaaaacaaaacaaagaatcagccatggccaggctcgagggtgcacacttgtaatcccaacactttgggagtctgaggcaggtggatcacttgaggtcaggagttcgagaccagcgtggccagcatggtgaaatcccatctctattaaaaaaaaaaatagctggacctggtggcatgtgcctgtaattccagctacttgggaggctgaggcaggaggactgcttgaacccgggaggcggaggttgcagtgagccaagatcgtgccactgagctccagcctgggcggcagagtgagatctgaaaaaaaaaaattggctggccatggtggggtgcacctttagtcccagctactccggaggttgacgcaggacaatcgcttgaacccgggaggtggagggtgcagtgagccgagattgtgccactgcactccagcctggcgacacagcaagactgtctcaaaaaaaaaaaaaaaaatggtatctggctgggtgcagtggcccatgcctatagtcccagcactttcggaagctgaggcaggtgaagcacttgagggcaggagtttgagaccagcctggccaccagagcaaaacctcgtctctactaaaaatacaaaaattagctgggtgtgggggtgagcacctgtaatcgcagctactcagcaggctgaggcaagagaattgcttgaacctggaggcagaggttgcagtgagccgagatcacgccactgcgctccagcctgggtgaaagagtgaggctctgtctaaaaaaataataataaaatgaaataaataattttatctaaagctgggtatggtggctcacatctgtaatcccagcactttgggaggctaaggcgggagaatcacttgaacctaggagttcaagaccagcctaagcaacatagtgagacccctcatctctaaaaaaactaaaaataaaataaattagccaggtgtggctggagtgcagtggtgtgatcatggctcactgcaccctcgacttactgggctaaagcaatcctcctgcctcagcctcccaaggagctgggactacaggcgcacgccaccatgcccagctgatttttgtagtttttgtagagaaggggtctcaccatgttgtccaggctggtctcaaactcctaggctcaagtgatcctcccacctcagcctcctgagtagctgggaggctgagctactcagcctccaaagtgctgggattacaggcataagccagtgtgctctgccctgaagtagtgtttataattttcatatcctctacaatctagccttaaatgttatgaactgtggctgggcacagtggctcacgcctgtaatcccagcactttgggaggctgagggaggcggatcacctgaggtcgggagttcgagaccagcctgaccaaaatggagaaaccccgtctctactaaaaatacaaaattagctgggcgtggtggcgcatgcctgtaatcccagctactcgggaggctgaggcaggagaattgaacctgggaggtggaggttgcggtgagctgagatcgtgctattgcactccaacctgggcaacaggagcgaaactctgtctcaaaaaaaaaaaagttatgaactgtaaatgtgtggtattatactgcagacgtccctctgcaatgtgctttttcaggctacgagaggttataaagcttcatgcagaatgacatgagtaattctggttaaattccttctcccggctgcgcagtagtccagtattcaaccagattgcaatttacttaggcagtctcttattgagggactttgcaatggtctccccttttccatatgataaacaaggcggctctaaacattctcataagtgtccctgggagcacatgagctgactgtttatagagtgactgtcactgtccaggagtggaactatatggcctcagggaagatgtttctgagtttttgtttttttttttgagacggagtctcgatctgtcgcccaggctggagtgtggtggctcaatctccgctcactgcaagctctgcctcctgggttcacgccattctcctgcctcagcctcccgagtagctgggactacaggcgcccgccaccatgcccagctaatttttttgtatttttttagtagagacggggtttcaccgtgttagccaggacggtcgcaatctcctgacctcatgattcgcccacctcagcctcccaaagtgctgggattacaggcgtgagccacggcgcccggcctgggtttttttttttttttgaagcaggatcttgctctgacatataggctggaatacagtggtgcaatcatggctcagtgcagccatgacctccctggctcaagcagtcctcctgcctcagtctcctgagtagctgggaaatacaggaacacgccaccacacacagctatatatatatatatatatatatatatttttttttttttttttttttttgagacagcatcttgctctgtcacctaggctgaagggcagtggcatgatcactgtagcttcaacctcccgggctcaagtgatcctcccacctcagcctcctgagtagctgggactacaggtgcacaccagcacacagcacacctggctaattttttgtatttttagtagagacggggtttcgcgatgttgcccaggctgatcttgaactcctgggctcaagtgatcctccacgcttagcctccaaaactgctgggattgcaggcgtgagccactgcatccagctttgactgtgttatcaaatcactctccaaagtcacaccatggaattatactgcccctctgtgaagggaggatacctccctgtgaaacaatatatattttttttagatggagtcacccagactggagtgcaatgttgcaatcttggttcaccgcaacttctgcctttcaggttcaagtcattctcctgtctcagcctcctgagtagctgggactacaggcatgtgccaccatgcccagctaattttttgtattttttttttttttggatagagtttttgctcttgttgcccaggctggagtgcagtggcgtgatctcggctcactgtaacctccaccccctgggttcaagcgattctcctgcctcagcctcctgagtagctgggattacaggcgcccgccaccacgcccggctaattttttgtattttcagtagagatggggtttcatcatgttgaccagactggtctccaactcctgacctcaagtgatccacccgccttggcctccctaagcgcaaggattacaagtgtgagctacggcacctggccaatgtttcatatttttgttttttgagaccgagtctctgtcacccaggctggagtgcagtggtgcgatctcggctcactgcaactccgcctcccaggtttaagtgattctcctgcctcagcctcccaagtagctgggatgtgcgtcaccacgcccagctaatttttatatttttagtagagacggggtttcaccatgttggccatgctggtctcaaactcctaacctcaagtgatctgcccgcctcagcctcccaaagtgctgggattacaggcgtgacccactgtgcctggcttgagacaacttcttaaagaaccagtcaaaaataaaaaataaaaataaaagaactagtcagactgcttcactctctggcttaaaccttccatggctccccattgctcccggagaatgcccaaccccttgacccttgattctgagtacccccaccctggcttttgcctgctatgccccaatttcaattgttacttccccttccaaactctcaaaattgataccccagtcaccctgaaggtctttcgcttcctcaaacagatcaagctctccgggcctccatgcatgctgttccctctgctgagcgtgtttcacatcacccgcacacctgtctgaatcctttaataatcagtcatgggggcgggcacagtggctcacacctgtaatcccagcactttgggaggctgaggtgggcggatcacgaggtcaggagatcgagaccatcctggctagcacagtgaaaccctgtctctactaaaaatacaaaaaattagccaggcgtggtggtgggtgcctatagtcccagctcctcgggaggctgaggcaggagaatggcgtgaacccggaaggcggagcttgcagtgagctgagatcgcgccactgcactccagcctgggcgacagagcgagactctgtctcaaacaacacaacaaaacaaaacaaagaatcagccatggccaggctcgagggtgcacacttgtaatcccaacactttgggagtctgaggcaggtggatcacttgaggtcaggagttcgagaccagcctggccaacatggtgaaacccccgtctctactgaaaatacaaaaattagccaggtgtggtggtgggcgcctgtaatcccagctactcaggaggctgaggcaggagaatcacttgaacccgggaggcggaggttgcagtgagccgagatcacaccactgcactccagcctgggtgacagagcgagactccgtctcaaaaaaaaaaaaaaaaaaaaaagccgggcacggtggctcacacctgtcatcccagcactttgagaggccgaggcagggggaacagcatgcatgttcaagaccagcctgaccaacatggtgaaaccccgtctctactaaaaatacaaaaattagctgggcgtggtggcaggcgcctgtaatcccagctactcaggaggctgaggcaggaggatcgctagaacccgggaggcggaggttgcagtgagccaagattgtgccattgcactccagctttgaggactgagcgagacttcgtttcaaaaaaaaaaaaaaaatcagtcatggccaggcgcgatggctcatgcctcccaacactttgggaagccaaggcgggtggatggcttgagcccaggagtttgagaccagcatgaggcaacatgcaaaaaatacaaaaattatccgggtgtggtgacatgtgcctgtagccccagctatttgggagactgaggcaggaaaatcacttgagcctgggcagttagaggctgcaatgcgtcatgattgcaccactgcatttcagcctgggcaagagagagactgtctctacgaaagaaaaaaaaaaaaagactcagccatcaatggggaagtaggaagtgttataaaaattgattacaatgcccccatccagtcatggaaagctgggaatgggggaggtaagaggagtttctggaggaaggtatatgtaaccaaagccgccttagaaaggcctttccttggttgggcatggtggctcacgcctgtaatcccagcactttgggaggctgaggcaggtggatcacttgaggtcagaagttcgagaccagcctggccaacatggcaaaactccagctctactaaaaatataaaaactagccgggcgtggggtgtgcacctgtaattccagctactcaggcggctgaggcaggagaatggcttgaacctgggacatggaggttgcagtgagctgaggtcacaccactgcactccagcctgggtgacagagtgagaccctatgtcattaaaaaaagaaaattgggccgggcatggtggctcacacctgtaatcccagcactttggagggccgaggcgggcagatcacgaggtcaggagatcaagaccatcctggctaacacggtgaaaccccacctctactaaaaatacaaaaaaaaaaaaaaaatctagccgggcatggtggcacacacctgtagtcccagctactcgggaggctgaggccggagaatcgcttgaacccgggaggcggaggttgcagttagctgagattgcgccattgcacttcagcctgggacagagcgagactccatctcaaaaaaaagaaaaaaagaaagactgtagtagatatatttggaagtgcaatttcctgtgcaggaggagggaaagcctttctttcttttttttttttttttttctttgagatggagtttcgctcttgttgcccaggctggagtacaatggcacgatctcagctcactgcagcctccacctcccaagttcaagcaattctcctgcctcagcctcctgagtagctaggattgcaggcacctgccaccatgcctggctacattttgtatttttagtagagatgcggtttcactacattggccaggctggtcttgaactcctgatctcaggtgatctgcccgcctcagcctctgaaagtgttgggattacaggcatgagccaccgcacctggcctttttttatttttgaaacggagtctagctctgtcacccagcctggagtgcagtgctgtgatctcggctcactgcaacctccatgtcccaggttcaagctattctcctgcctcagccttctgagtagctgggattgcaggcacctgccaccatgcctggctacattttgtatttttagtagagatgcggtttcactacattggccaggctggtcttgaactcctgatctcaggtgatctgcccgcctcagcctctgaaagtgttgggattacaggcatgagccaccgcacctggcctttttttatttttgaaacggagtctagctctgtcacccagcctggagtgcagtgctgtgatctcggctcactgcaacctccatgtcccaggttcaagctattctcctgcctcagcctcctgagtagctggaattacaggtgcgcaccccacgcccggctagtttttgtatttttagtagagctggagttttgccatgttggccaggctgctctcaaacttctgacctcaagtgatccaccagcctcagcctcccaaagtgctgggattacaggcatgagccaccgcgcccggcctgactttctttttttaatgacactgggtctcactctgtcacccaggctggagtgcagtgacgaaaccatacctcattgcaggcttgaactcctgggctcaagcgatcctcttgcctcaggctctcaagttgctgggactacaggcatgtaccaccatgcctggctaatttctaaaaattattttgttgagacaaggtctccctatgttgcccaggctggtctccaactactggcctcaagcaatcctcctgcctgggcctcctcaagtactgggattacaagtgtcagctactgcacctggccaagttttctgatttattatatttcttgctgtcctccctactaaaatttcagctctacaaaggcagtgatttgcagctgccacacagtagatgcttacaaaatgttcaccgaatgaacgggtggatggatggatggatggatggatggatggatggatggatggatggatagatggatgaataggtgggtgggtgggtggatggatggatggatggatggatggatggatggatggatagatggatgaatgggtgggaggatggatgggtgggtggatggatggatgcatggataggtgggtgagtgggtgagtgggtgggtggatggatggatggatggatgggtgggtgggtggatggatgggtgggtgggtggatggatggatggatgaatggatggatgggtggatggatgggtggatgggtgggtggatggatgggtggatggatgaatgggtgggtatggatggatcgatgggtggatggatggatagatggatgaatgggtgggtggatggatgggtggatgggtgggtgggtggataggtgggtggatgggtgggtgagtaggtggatggataggtggataggtgggtggatggatgagtgggtgggtggatgtatggatggatgcgtgggtggatggatgggtgggtgggtgggtggatggatgcgtgggtggatggatgggtgggtgggtgggtggatgaatgggtggatgggtggatgggtgaaagggtgggtggatgggtgaatgggtgggtgaatgggtgggtggatgggtggatgggaggatggatggatgcatgggtggatggatgggtgggtgggtggatggatgggtggttgggagggtggatgggtgggtggatgggtggatggatggatggatggatgagtgggtggatgggtgggtggatgggtgggtgggtggatagacggatggatggggcccagctgctgcttgcacacccaccccagtccccatggtgccaacgccccagactcaccaactttatgtgcaatgtggatgcagacttcctcagctgtcagcgatgactcactgaaagtgacccagggctccccgccgcctggaccagcccagtgcagaagcaccttcaggcctcccatggcagccatgggctgggctccatccccaacgggcttactgcccctggccatcccccagtggcgcagaggcatgctcccggcaggtggctcagctggaaaggggacaatctgtcagctcccaagtctcagcccagagacccctgttagctcttcaaccttccacccaccccagctaaggcctgaggggaagattctgggctcccatcttggcatgacattagagacccgattccctctctgagtctcgttttccacatttattggacagggttggggtatgcatccccacctagatctctcatcaacaataacactgaaccctcctctctttccacaaattgacacagatataaaaatctgctctggccaggtacagtggctcacgcctctaatcccaggactttgggatgttgaggcaagaggattgcttgagcccaggagctcgagaccagcctaggccatatagcaagaccctgtttctacaagacgttttattttatatcttatcttatcttatcttatcttatcttatcttatcttatcttatttttgagacagagtttcactcttgttgcccaggctggagtgcaatggtacaatcttgctcaccacaacctctgcctcctgggtttaagtgattctcctgcctcagcctcctgagtagctggcgcctgccaccacaccgggctaatttttgtatttttagtagagacagggttttgccatgttggccaggctggtcttgaacctctgacctcaggtgatccacccgcctcggcctcccaaagtgctgggattacaggcgtgagccactgtgcccggcctctacaagaaatttttaaaatttagccaggcgtgggggtgcacatctgtactccaagctactcgggaggctgaagtgggaggatctcctgagcccaggagttggaggctgcagtgagcagtgatcgcaccactgcattccagcctgggtgacagagtgagaccctgactctaaaaatataaataaataaataaataaataagtaataaaaatatataaaaagggccaggcgcggtggctcatgactgtaatcccagcactttgggaggccaaggcggacagatcacgaggtctggagattgagaccatcttgaccaacatggtgaaaccccatctctactaaaatacaataaataaataaataaataaataaataaataaataaaaagtaaaataaaaatctgctcttaacacacctccccaaaataaccagacaggcagatgtggtcaaacatacctgagggtgagtcctggagctccctgtgtcaactcaagcaagccacttagcaattctgggcctcagtttccccatctggaaaagggaggtcctcagggtgttgccatcaaaagatggttgtaatgtttcaatatagttccgcatattacacattcagcacagaccctgattcaggcacacacaaaaagaacaaatatgaccaaaacaagaataacataattgttattagtttcatcgtggtgatggcctctttcaggccacaattctcctctcccacatttacccccatgagtgacctcagtccctgttgactccccaaagcctaggagagtttatgtccagctccatccccccaatccagggcctgagcctcctgagggcgccagtatggaagtggaggggctgtcacttccacccatgttgctggtttcctcatctggaaaatgggcatgtaacagtgtctacctcaaaaggctgctgggaggatttaacgcgaggaggcagagaaagtgcctggtatacagtaagcgcttaattagcctttgccattaatacctattcatgttatagatgagatcccggggatggggctttcgcggagcctacttcctccttcctcctttctcgtccccactggacccagacccagctttgaagacagggtcggagtgaagtttgcaactgggaaggctgcacgcccccatgtcctccccccaaaacctctaaacccggccggcaacggcgggaactgggatgtgcacccaccgggcatcggagcagtcccgaggcaccaggtgctcccatccaagtgcagcctgtcaagcgcagccagtccccgcggcttcttcctgaggacctccggccgcgctccttccgcgcccgcgtccagactcacccttccgggggaacacaagctcgaacccggacccctccccgctcccgcgggtagctactgcttgtcccccgccgagacgcctcctcccattggccgcctgaaacgcacacgcccattggcagctgctctgttctccctgctcgtcaccattggatttttttttttttgccatggtggcggcactctcattggtcctggggctcattcgtcactcagccgcgattggctgagtcggcacccagatgcgctgtcgcttctgctattggctggcactcggtggacggagacgggggaggggcttgcgagaggcgggagggagagcgaagtgtgtgggcaacgcggccggatcctggagttcccctccgtgctgtggaattgggtcaggcgtgtacggtcctgaccctaggacacagctgcatgtcctcacctcggtgttcaaagctgcaccggccaccattcaaccctccgacgccctgccctttggcttccccgttccatccggtcctgtctcctttccctcgtttctacctggccgactccatcctgctgactagaattccccctccttcactcctgggaggcattcctcgcccacctgccccagtcctcttcctgatcacctgcagccctgtcctctgaagctccctagcggtcagggtagcagcttggacatcccgccagacgtgaattcaaatccccactccgcaagtcgtgcccatttgctgagaagcctacagccagagcgtttcacatacattatctcatttgatcctagcagcaattccctgtatggcggctcttattatccccatttcacagaggaagaaactcaggcatgaagaggtaacaaagaccgtcctctgacccttcttctgtgccacaccataaccactcctcgactttgtctttcacctgcccagccaagtcttagcaaagaagcctattaagtcatccgctcatccttgatgtctgatcaacttcctcatcttccacttttttttttttttttttttaagatggagtttcgctcttgtcgcccaggctggagtgcaatgctgcgatctcggctcactgcaacctcagactcccggattcaagcgattctcctgcctcagcctcctgggtagctgggacaacaggcgcccgccaccacgcccggctaatttttgtatttttagtagagatgggatttcaccatcttggccaggctggtctcgaactcctgacctcgtgatccaccctcccaaagcgctgggattacaggcgtgagccaccgcacccggcccttttgttgttaatttttaaattttgtggctaatttttaaatttttgtagagatggggtctggctatgttgcccaggctggtcttgaacttctggcctcaagcaatcatcctgccttggctttccaaagtgctgggattacagatgtgagctaagacacccagctccatggagttggtcttaactgccatggccaagggacatgtggctgcttctctctgagtcagaaaatatgggtaaaaagcctcctcacagggcagctgtggacattcagtatgaaaatgctgaaagagatcgggaatggtctctttcacacctgtaatcccagcactttgggaggtggaggcgggcggatcacctgaggtcaggagttcaagaccagactggccaacatggtgaaaccctgtctctactaaaaatgcaaaaattagctgggcatggtggtgggcacctgtaatcccagctattcaggaggctgaggcaggagaatcgcttgaacttgggaggcagaagttgcagtgagccgagatcacaccattgcccttcagcctgggcaacaagagctaaactctgtctcaaaaaaaaaaaaagaaaaagaaaaagaaagaaaatgctgatagaggccgggcacagtggctcacgcctgtaatcccagcactttgggaggccgaggtgggcggatcatgaggtcaggaaatcgagaccatcctggctaaggcggtgaaaccccgtctctactaaaaatacaaacaattagctgggcgtagtggcagcctgaggcaggagaatggcgtgaaccggggaggcggagcttgcagtgagccgagattgcgccactgcactccagcctgggcgccagagtgagactctgtctcaaaaataaaataaaataaaataaaataaaatgctgatagagacttgtcctggctggatgcagtggctcatccctataaacctagcacttcagggagctaaagaaggagtactgtctgggcccagttcaagaccaacctgggcaatatagcaagaccccatctctacccaaaataaaaaaaattagtctaaggctgaagtatgagaatcgcttgagcccaggaggtggaggttgcagtgggctgagatcccaccactgcactccagcttgggctacagagtgagactccatctcggggggaaaaaaaattagttagtcccagctactccgaaggctgaggtgggaggattgcttgagcccaggaggttgaggctacagtgagccgtgatcacaccactgcactccagcctgggcaacttgacctcctgggctctgctgtattttcttcagagtccttattgcaacctgacatttcatgggaagtttctttctttttttttttttttaaagagacagagtcttgctctgttgcccaggctggagtgcagtggcgcaatcttggctcactgcaacctctgcctctcaggttcaagcaattctcctgcgtcagcatccccggtagctgggattacaggcgtgcaccaccacgcctggctaatttttgtatttttaatagagacagggtttggccaggttggccatactggtctcgagctcctgacctcaggtgatccacccgccttggcctcccaaagtgctgggattacagatgtgagccaccgcgcccagctgggtttctcttctttctttctttcttttttttttttttttttttttttttgagacaagaatctcgctctgttgcccaggctggagtgcagtgctgtgatctcaattcactgcagtctcaacttcccagattcaccattcacaatcttccacctcagcctcctgagtagctgggactacagatgtgcatcacgatgcctgggtaacttttttttttttgaggcggagtcttgctctgttgctaggctgaagtgcagtggcacgatctcggctcactgtaatccctgcctcccaggttctagcgattcttctgcctcagcctccagagaagctgggattacaggcgtgtgccaccacacccagctaatttttttgtattttttagtagagatggggtttcaccatgttggccaggatggcctcaatctcctgacctcatgatcctcacgcctcggcctcccaaagtgctgggattacagaagtgagccaccgcgcccagccgcctggctaacttttgtgtgtgtgtattttttatagaaatgggcttccaccaaccccgtctctactaaaaatacaaaaattagccgggtgtgttggtgggtgcctataatcccagctacttgggaagctgaggcaggtgaatcacttgaacctgggaggcggagtttgcagtgagctgagatcgcgccactgcactctagcctgggcgacagagtgagactctatctcaaaaaaaaaaaaaggaaaagaaatgggttttcaccatgttgcccaggctggtctcaaactactgggctcaagtggtcctcccgccttgacctcccaaactgctgggattacaggcgcatgccaccacacccggctaattttttagtattttttagtagggacgaggtttcaccatgtgggccaggatggccttgatctcctgacctcgtgatcctcccgccttggcctcccaaagtgctgggaataccggtgtgagccacctcgcctggccggctggctaacttttgtgtgtgtgtaatttttttagaaatgggttttcactatgttgcccaggctggtctcaaactactgggctcaaactgctgggctcaagtggacctctggccttgacctcccaaactgctgggattacaggcatgagccaccgtgcccagcccctgggaagtttctttgagcacaagttctattgcctgtctgcggttctaggaccgcaccagaaagaggtccgtctggttgtctgctaagccctcagtgcctgagattgtgcatccagcccagtaggtggcttaagaagccacagctggaggggaatgaatggcctgggagccaggaatccctggctgttgtcctgcctgctgcgggagggctggctgtgagcttcctctctgtcgccgcttagagtacagtacctagaagccaagagtgccagatttttctttttccttttttcttttattgagagagggagtttcgctcttgttgcccaggctggagtgcaatggcacaatctcggctcaccacaacctctgcctcctgggttaaagcgattctcctgcctcagcctcccaagtagctgggattacaggcatgcgccaccacgcccggctacttttttgtatttttagtagagatggggtttctccatgttggtcaggctggtcttgaactgccgacctcaggtgatccacccacctcggcctcccaaagtgctgggtaatactggtgtgagacaccgtgcccggcctagagagtgccagatttttcaacagccattggggcaatgctccgtgattagatgctagaacacagtgggccgagtgggcctgggacccggtattccccgctcccaaaggaactagaaggaaatgccacatgaggcgattaataataacaatgctagtcatactcccagtaacgatatcaattctaacaatgagctggtgcggtggctggcacctgtaatcccagcactttgagagacagaggcaggaggatcgcttgaacccaggagtcccagaccagcctgggcaacatagtgaaacctcgtgtctacaaaaaaaatttaaaaattagctgggcatggtgatacacgcctgtagtcccagctactagggaggctggggtgggaggatcgcttgagtccacaggttgaggttgcagtgagctgtgatcgcaccactgcactccagcctgggcaaccgagcaagaccctatcaaataaataaataaataaataaataaataaataaataaataaagctgacattttcccagcctgcacactggggccgagcgtgggtatttagccatctctgggtcttctcagtttctttcttttttttttttttttgagatggagtctcactctgttgcccaggctggagtgcagcggcgtgatctcggctcattgcaagctccacctcccaggttcatgccattctcctgcttcagcctcccgagtagctgggactacaggtgcccgccaccacacccggctaattttttgtatttttagtagagacggggtttcaccagggttagccaggatggtctcgatctcctgacctcgtgatccgcccgcctcggcctcccacagtgctgggattccaggcaccagccactgcacctggcctcttctcagtttctttgcaagtggtatcagcacccccacttgacaattgaagaaaagaggctaaggaggctgttttgccaaggcctggcgcctcctgcccaaactcagacctggtccataagggaggccccagaccccacatgtgactaacaggagggggtttcccaggactgagggggttccccaatggggggctttccatgctaaaattgggacagtcctgggcaggccaggacagttggccacgccactacggcgggtttctcagaaggaacaaaagctgggggcttcccctggctctgcaagggctgcagggaggggcctcctcagagccccctgggacctgggaaaagccaagagttgatggattaaaagtaaaatacctttgtgttttcatgagtgagaaagttcagggaacagccagtctcctcctcaaaacaaccatgagatggatttcctgggaaatcttttttttttgagacagagtttttcctcttgtcgcccaggctggagtacaatggcacgatcttggctcactgcaacctctgcctcctgggttcaagggattctcctgcctcagcctcccgagtagctgggattagaggcgcctgccaccacgcccagctaatttttgtattttttgtagacacggggtttcaccatcttggccaggctggtctcgaactcctgacctcaggtgatccacccgccttggcctcccaaagtgctgggattacaggcatgaggctaccgcactcagcctcctgggaatctttccacaaaaattctacgctcctttgggcacgtgtgtgaacctgtgttctctagaaaattctcaggagcagccccaaatgggacactcggtgctggcctgagaggatacagaggagtaacttacacacatgaaggctggcaccagacgggctgagttcaagccccagctccatcactgtgtgatcctgggcggccccttaaccccactgtgcctcagtttcctcctctgcaagatgtgactatttagtcccaaacccagaggcatgtcagggacatcaaatgagttaatacacttcattagccaggtgtggtggtgcatgcctgtacaggaggctgaggcaggagaatcgcttgaacctgggagatggaggttgcagtgagccgagatcgtgccactgcatttaagcttgggcaacagagcaagactcggtctcaaaaaaaaaataaataaaaggactggtggtggatagccagatgcagtgtgtgtctcttggctgtaatttgagctactcaggaggttgaggcaggagaatcacttgagcccagaggttagaggctgcagtgagctatgattgtgccactgcactccagcctgggtgacagagccagatcccatctcttaaaaaaaaaaaaggggggggccacacatggtggctcatgtgtgtaatcccagcacttcggaaggccaaggcgggcagtcctcttgaggtcaggagtttgagaccaacctggccaacatagtgaaaccctgtgtctacaaaaaatacaaaaattaggccgggtgcggtagctcacgcctgtaatcccagtactttgggaggctgaggcaggtggatcatgaggtcaggaaatcaaacccatcctggctaacacagcgaaaccccgtctctactaaaaatacataaaaattagccgggcgtggtgccagacgcctgtagtcccagctactcaggaggctgaggcaggagaatggcgtgagctcgggaggcagagcttgcagtgagctgagatcaggccactgcactccagcctgggcgacagagcaagactccatctcacaaaaaaaaaaaaaaaaaaaaaaaaaaagggccgggcacagtggctcacacctgtaatcccagcactttgggaggccgaggagggcagatcacgagatcaggagatcgagaccacggtgaaaccccgtgtctactaaaaatacaaaaaattagccgggtgtggtggcgggcgcctgtagtcccagctactcgggaggctgaggcaggagaatggcgtgaaccccggaggtggagcttgcagtgagccgagatcatgccactgcactccagcctgggcgacagagtgagactctgtctcaaaaaaaaaaaaaaaaaaaagccaggtgtggtggagtgcgcctgtaatcccagctacttgggaggctgaggagggagaatcccttgaaactgggaggcagaggttgcagtgagcccgagatcatgcgactgcactccagcctgggcgacagagtgagactcagtctcacaaaatacaaacaaaatcttcaataacaaggaatgcagtattttgaaaaactgaaattaacaccaaaatgtgtatgatgaacaaaaattattattattattattatttttgagacggagtctcactctgttgtccaggctggagtgcagtggcgcgatcttggctcactgcaacctctgcctcccgggttcaagcgattctcctgcctcagcttcccgagtagctgggattacaggcacgtgccaccacgcctggctaagttttgtattttttgtacagacggggttccaccatgttggtcaggctggtcgcggactcctgaccttgtgacccgccctcctcggcctcccaaagtgctgggattacaggcgtaagccaccgcgccccgctcaaaaattaaaatttttactcggcagggcacactggcctgtagtcccaacactttgggaagctgaggcgagcagactgcttcagctctgttcaaatccagcctgaacaacatggagagaaccctgtctctgaaaaataaataaataaaaagatcttggaaggtgtctgaggctcaatcagggttccaggagtccccctgcagctcctacctgtcgttctcactcatacaaaacactaaggaaagttactagatttgcagctcactcctgccccctggtggtgatcggcttgggcacaacagcattccaggggtttttatccaatgcttttgcaaatgtttcctgaaggtcccctttctggcactgtgtatgttgcaagaaaaagtccgtgctctggtggcacccacagtacatgggaggtgacaatacacaggtctgtgtgaagaaaggcatgtgaggcaggtttggtggctgagcatgaggggaattaaagtaggtcaaggagggcctcagagaagtggcattgatctgtggtctgagtgacaagcagtcccctcagagatgatgtcccccaggagaggtaggcataagtctactggatcggaggtatttcatgtcttaaactgatgtgaacctgggtatttattgtactttgatcttagctcactgcagccttgacctcccgggctcaagcaatcctcctgccttagcctcccaagtatctgtaactacaggtgcgccccactgcgcccagcactgttttttttttttgttgttgttgttgtttttgagataagtctttgtcacccaggttggagcgcagtggcgtgatcctggctcactgcaacctccacctctcaggttcaagcagttctcctgcctcagcttcctgagtagctgggactacaggcacgtgccaccatacctggctaatttttgtgtttttagtgcagactgggtttcaccatgttagccaggctggtcttgaactcctgggctcaagtgatcctcctgcctcagtctcccaaagtgttgggattacaggtgtgagccacgcctggccgtgcactcttctttaagacttttcctgtggcagaaatattttgtgacttttgaagacggccagcaagtgccaaggtccccgttcagagaatctgagtgccaggtgccagttgtctgaaccattacctcacttgtccccctcactacggcctgaggagggcactagcgcgacgacgttagccctaagagcagggacactgaggctcagcgcatcacccaaagccacacgaagagaaatttcaagtgctcaagggccagcatggagttggggacaacagggcagcgaggcaacaggcagatggtgctgggggcctggtcagttgcagggaggacttcggcttctgctcccagggaggggagtcctgcgaggcttttgagcagaggtgggacatgccctgacctgggtgttcacaggtaccctctggctgctgcctgttcaggggctgacttgtagtggggaatgaggaggaggctggggcaggaattagagccagaggcgatggggacctgaaggccatagggacaaaaggcagtggtcagaatcaagaatgtttgggggggtggggccaagtgcagcggctcacacctgtaatcccagcactttgggaggccaaagtgggaggatcacctgaggtcaggagttcaagactagtgtggccaatatggtgaaaccccatgtctactaaaaacacaaaaaattagccgagtgtggtggcgggtgcctataatcccagcaggaggctgaggcaggagaatcacttgaacctgggaggtggaggttgtagtgatccgagattccaccaccgcactccagcctgggtgatagctggactctcaaaaaaaaaaaaaaaaaaaaatctgtttgggggcagcgctggccatagggtggggagatatagtccatccaggatgctgctccaaaaggttgtaggaagctggaaaggtgtggggtgcgggcaggtgcgccagatccacaaaaccctagggaatgtgacttggtttgcagatcactactgccctctggtggtgatcagcttgggccaccctgcattctggaggtccaagtagggacaagggagtgggtgggtgagactgaaggttgggggcttttgaggcctctggaagaagactgttccaagttgtggaacagcatgtgtgaggcgaggacccacgatggctggtgggcaaaggaccagagaagcacagctcagcccccaatatcccaccaagtttccctcccacctacaagagatgggctgcctgaacggccctcccagcagcccagagagcatctgaaatcttttattggaagatcattgctgtttgccaaatagaagacacagacagcagacgaacagtgaaaacagagcccagtgacgagagccggccccttggctggggaccctccccaactacctggtagaccagcctggtgacctctgcccttccccggacccccgggcctttggcataatgctgatggggggctgcaggcagtgaagccccttgactcaaagcagagacttgaatgggcgctggagagtggagacagtggagaggccagggagggctgggcgggccccccaggctgggccgagcagcgcaagtagaggaagtcaggagcgggcgagatggcatctatctgttttctgaaaaggggcacataggggcctggaagcaggtggcggtggtagctggggcaggtcacacactgacatccttctcatcgcccgtcttgggaacagcttccagtaatgggtccccaggacctgcctcctctccctccttggcctcgctggccttagagttggggacccagaggccagagtcaatgcagcgctgcatgtggtactttgcgtcctgtgaggagaaggcaggcagatgaggtggggccgccagccggtggtccccgttgtccccgttgtcccttgcacatccccaagctggcttcctgcctattgatattttacctatttgagacggagtctcactctgtcacccaggctggagtgcagtggtgcaatctcggttcactgcaacctccacctcccaggttcaagtgattctcctgcctcagcctcccaagtagctggggttaccgacgcctgtcaccatgcctggctaattttacttttagtagagatggggttttgccatgttggccaggctggtcttgaactcctgcccttaggtgatctgcctgccttggcctcccaaagcactgagattacaggcgtgagccaccgtacccagctggaaatttaaattttatttaactttaatttaaatttagatagtgcaatctagaacaaaagccagcaaatttttttttggtaaagggacagactaaatatttctggttccgtgagccatatggtctccatcacgactcaactctgctgtggtagagcaagatcggttgtagatgatagggaaacaattgagtgtggcttctttgttctaataaaactttattataaagacaggcagtgagtctgggagctgcggtttgcagaacctggtctagatggctatgcccatagaagcttctagaaactcagggccagtcctgcagctagacccattttacagacgagaaaaccagtgtgatcaaccagtgagccaagtggtaggaataggatcaaacagtgtcctacttagattcaacgtctattaccacttccaaaaatatagccagtgagaccttgtctttataaaaacataatttaaaaaaaaattagctagatgtcatggtgtcagcctgtaaccccagctacttggggaggctgaggtgggaggatcacttgagcctgggaggtcgagactgcagcctgggtgagagaggaagaccctgtctctcaaaaacaagtagacaaaatccaattaacagccagcgtttaccagcccctgccatgtgctcacctccctttcccacgcattttgtgagctgatattgagagaaaatgtggtttggataaggaaactgaggctggactcagtcacagtaacagtgacagtcacgaaggacatgcgctcaaagctcagcatttatctgctggatactgggatacagtaggtgctcaatatatgtgggtgtgtgccaaggtgacacgaccccccttactccttggagaagccttggaggggcactttcaccagccggcttcagagacttgggacacagggctgggggagacacacggcccgccgggaaggcatggggcgcgggggttactcacggtggggtccatcttgctgatggcgtcctgcagcatctgcacgtccttcacatcgaagcacttctggagttcctgggggtacagaggggctggggtcaggggctgggtccctgtggccctggggggtcccgctcagggtcttcctgctgcccgcctgggccggggagccccacctcagggagggactcgtagacctcgacggggtccaggccgccggggccgagccgcttcttgcgctcctcctcctcgtactccttcatggccttctcgatgcgcagcttggcacggccccgcacacgctccttgaaggcttccagctcgtcgttgaagccctccatgtactggcgatcggctgtctatgggggttgggcagtgctcactggacctggcccaacgctcaggagggactggggggcccaggaccctccagccacagctcctcagaggcgccccacggttccccaagtctattcctgacctacatgaagggctccccaaggcctgggctcccccgccggggacctcatctggcatttgccaaagaccacctgcttgggagccctgctctactgcagatctgagacactcatgtcctcagtgtccctgcatgggcacctctaactcaacatggccacctcccagcctgccttgtccttggtctccctaatctcggtaaggatagccctgttcctccaggtacgcaggttaaaaatcctagaggctaggccgggcgcggtggctcacgcctgtaatcccagcactttgggaggccgaggcgggcggatcacgaggtcaggagttcgaaaacatcctggctaacacggtgaaaccccgtctctactaaaatacaaaaaattaaccgggcatggtggcacatgcctgtagtcccagctactcaggaggttgaggctggaggatcgcttgaacccaggaggcggaggttgcagtgagccgagatcgtgctactgcactccagcctgggcaacagagtgagactccatctcaaaaaaaacaaaacaacaacaacaaaaaaaccctgaggctggcaggcacctgtaatcccagctacttgggaggctgaagcactagaattgcttgaacccgggaggcaggggttgcagtgagctgagatcacgccactgcattccagccttggtgacagagcaagactctgtctcaaaaatgaactaaaacccaaaaccctagaggcaccctcacctttgtcctttacccacatattcacctgggtaccttcagcacatcctactgctcccacatttttttgtaatgcagttttgctctgtcacccaggctgcagtgcagtggcaaaccacagctcaaactcctgagctcaagtgatcctcctgcctcagcctcccaaatagttgggactatagtactcagtcaccaagcctggcctgacctccacttttatttaattaattaatttatttatttatttatttttgagatggaatttcgctcttgttgcctaggctgaagtgcaatggcacgatctcggctcacagcaacctctgcctcccaggttcaagcgattctcctgcctcagccccccgagtagctgggattacaggcacacaccaccatgcccggctaattttgtattttcagtagagatgaggtttctccatgttaggctggtctcaaacttccaacctcaggtgatctgcccacctcagcctcccaaagtgctgggattacaggcgtgagccactgcgcccggcctccacttttaaagtctggcagaatctgcccacttctctcctcctccctggccccaccctctcctgatctaggatgcggtgactggaggggcttgagtcccagtggagaggagtcggccttacctagagcattgtgggctggttccctggggagggggcctccagccacctggcagctcagggaccctaccttaatcttagtgaagaactgccggaagcaggcccgggggtccacctttaggctcttggccagctccaggataaattgcatgacgattgtctggtgggccacctgctccatgagtgcacatttctgccaggaagaacaggcacagcgtcaccaagtggcggcctcatggcagcgccttttcacagtcccggggaaagctccactcacctcctccacctctaggtcaatgcaccaaatgaccaggtaattggctgtctcctcgcacaccaggtggacgttgtctgacaggtacttttggctgtcatcccagcggcgaagcatgcctgtgggaagatgctggcaaggtgctggagggccctggaggcaaagggcctgcctcgaccttgccccccataacccacaagccccactcaccaaagtgcttgatctgtttctcgtatttttccacgaaggtcttgtgtttctgctccctcacctcctctgagtcctcctccgtcttctcgggcttggtatttaccatgctctgtggtagggtgagagggggagtgggctggggcaaggctgcggagcgcctcgagcgcggccgggcgggccgtggtcgcagcgcccatcccatccacggcggaggtggtgacgaagccatgagcatcaaggtggcgggagcgtgggcatgggccttggggcagatcagaggaggggaccggtggggtgtttcatccgcccggccccccaagcctgtcccccctcccacgtggcccccgtccatccctcagctccccgccccccaccacactcttcaactacaccaccggggtcctcccctgaccaggcattgggtgcgcatgcgtcctggttgcaggctctctggctgcgcatgcgcactgcccgccccgcccgccccgcacaccttgctgaagccgtctttgctgagcgtgtccacgttccagggcatgctcttctccttcttgcgcatctcctccagcttctgctcccagctccgctcctccttgcgcagctgctgtgcctcggcctgcaggcgctccagctctgccttgccgccctcggccacctccagctccttcagtttcctctggcactcggccaccttgcgcttgcactcgcggcagcccctgtccagttcctccttctccttctggaactgctccatgcgttccacccgggcctgcgggcagggacggcctatcaactctggggagtcgtctgtcccttacccccgccccatacccaatccctgcaccggagatggccccaggaaaaagtacgcgtccacctcccgtgccctggtctcccagcttccgcccctgcgcccacaggtgccagcgcacacccaagtggggtcaggtccctccgtcctctgctcagaaccctggcggctcccatctcacagcagaacccaagttgtcaccacagcctacatgggccctacacaatctgcctcggcacctcccctggtaactcttccttccagctacaccagcccctcacttttctcaccttttcttgaggccattttttttgtttaagaaaacaaaacaaaacaaaacaaaaaacagggtctcactctgtcgtccaggtcagagtgcagtggcccaatgatgacatactgcagcctcgacctccctgggctcaggcgatcctcccacctcagtctcccaagtagctgggactacaggtgtgcaccagcacgcccagctaatttttgtattttcagtaaagatggggtttgccatgttgcccaggctggtcttgaagtcctgggttcaagcgatccttccctctcggcctcccaaagtgctgggactacaggcgggagctactgcactctgcggagcccacttttttcttgaacctcaaggccttcgcactggctgttccaactacttggaatgcttttccttcagagccccccacagctgactccatggcacccgtgccatctgggctccatgttgccttagcgaggaccccttccccaaccaccttcctgatgatggcaacttcccgctgcccctgtctggaattccctgcctcctcaacatcagcaaccactaacatcatatgacaattatttatcacgttttgggtactgcccccctccaatgaatgaagccctgctctctaaatatgggaacgtgttcgccattttgttcccagaaccaggaacgtggcctggtgcaaagcacgggctcagcaaatgcttgtttttttttttgtttttattttgttcagttttgtttgaacaaggtcttgttgtcatgcagactagagtgcagtggtgtgataatggctcactgcagccttgatctcccaggctcaacctgcctcaaccccaagtagctgggactacaggtgcacacaaaccaccaagcctggctttttttttttttttttttttttgagacggagtcgcccaggctggagtgcagtggcgtgatcttggctcactgcaacctctgcctcccgtgttcaagcaattttcctgcctcagcctccttagtagctgggattacaggcacgcgccaccacgcctgggtaattttgtatttttaatagagacggggtttctccatgttggctggtcttgaactcctgacctcaagtgatccacccaccttggcctcccaaagtgctgggattacaggcatgagccactgcaccagggccccttctagatgtttctttgttccacccataaccttgccccaggatcactgccaaggccctcttagctctgtctccagcccagcatgccctcctgagccccagcttggtgtctacctgcttcccgctcaccccagccccagatgtcactccccaggcactcctctttctccttataacagtgcctcatctcctcaggctcctggtccccgcctcactccctgtctccctcagacctccatctgggccccatcggattgtacaggcctctcctgagacccctgcgtggctccaccatcacctctcctgaacctcagtggaggctgctctatccagagccactaatcaaaccctgaaaccctgaaacgtgccaccaccttcaattgctgaccctctccaatccaggcacagctgccaccagggaggcctgtgaagcccatgcatttgaccacgtgaccagagtcctccccactacatcttggggggtctgaattcagatgggacttctgatcctggcatcctggtcctgggtcccaggcagatactggccctcatcgttccccgaaagtacgggctctgtcttgcctcttggcctctgcatgtgcggttcccttacctgcttttgcacccaaaactcagcttcaacagagccttccccaaatgctccctgcctgaggcaccactgatccctaaaggacctcctgtgaccatctgacgatgtggtgagggtgctggaggacagccttggggcaacggcccctgggtcctagcccacagccaccatgtaccggctgggtatcccgggccatcccctaacctcctgtaacctcagtttcctcatctgtcaaacagtcaacaatgctgactgcacaagctcatattggaagaaactaaggagatgattagagtaaaatgtcccgagccatgtgggccctcagcacgcacccttcctgtactggccagggtcattaccatctgtgcaagagaacaatctctctctctctctggggaccactctggggcctcaaaaaggaaatgtccttcaaatgcttagtttaatttctggcccagagtacacgctcaataactgggagtggttgttactacatggtcacagcacccggctgtgccactgacgggagatggaactttggccatgtcactgaaacctttcccagccttggtcttcccctctgtgaaatggagtctcacaggatcgccgtgagaactgaatgactaactctatggaaaatgcttccaaaacagccctcagtaggtgtgtcccactgttaccatctccgtccttgtcactgccacctgaatggtctgctgactcattcctgtgccttatctgaggctgtgtccccaggttctaaggcagggccaggcagagctggcccctactctaataccccaggggactgacacagccagcctgagcctcggattcccctatatgtataaggggtcaagaaggcctacgtggtcgagcgtggtggctcactcctgtaatcccaacactttgggaggccgaagcgggtggatcacctgaggtcaggagtttgaaaccagcctggccaacatggtgaaaccccgtctctcctaagaacacaaaaattagccaggcgtggtggcaggcgcctgcaatcccagctactccagaggctgaggcagaatcgcttgaacccgaggcagaagttgtagtgagctgagatcgccccactgcactccagcctgggcgacagagcatgaccctgtctgaaaaaaaaaaaaaaaaaaaaaaaaagctatacctcatgagataaacagcagctgcaggctgggcacagtgacccatgcctataatcctagcactttgggaggccgaggtgggaggatcacttgagctcaggaatttgagaccagcctaggcaacatagtgagattccatctcttaaaaaaaaaaagttgctgggtgtggtggctcatgcctgtaatcccaacactttgggaggccaggcgggcagatcatgaggtcaggagttcgggaccagcctggccaacatggtgaaaccccatctctacttaaaaaatacaaaaattagccgggcatggtggcgcgcacctgtagtcccagctactcgggaggctgaggcaggagaattgcttgaacctgggaggtggaggttacagtgagccgagatggcaccactgcactcctgtctgggcaacagagtgagactccgtcttaaaaaaaaaaaaaaaaaaaaaaaaagcagctgtggcctctccaactccctttctccacgatgggcctgtgtcaccctggagcctgcccaccaccctgcaatccgctgctgggctgccaccagtctcccctgtgtcctctgaacaactgccagggaggccgcagctaaaaaaggcctcttggagttggcgggggcggcagcctgcccagcctgggctttacacctcctatcggggaggggctgtagcaggctgggcaggggagaagccaccccagcaagcagggcccacagatgtcactaccctcctgccttacagttagggaaactgaggctcacagaatctcaatgtcatacaactcattagaagaaaccactaacagcagctgtctctgggcaggagagccggcgagctggggctgagaaaagggattcatttgtccgcttctggaaactttgaaatttttttttttaagagacaaggtcttaggccaggcttggtggctcacacctacaatcccagcactttgtgaggctgaggcaggtggattgcctgagctcagcagtttgagaccagcctgggcaacatggtgaaaccctgtctctaccaaaaagtacaaaaatcaaccaggcatggtggtgtgtacctgtggtcccagctactcaggaggcagaagtaggaggatcacttgagcccggaaggtggaagttgcagtgagctgagatggcgccactgccatctcagggtgacaaagcaaggccctgtctcgaaaaaaaaaagagagagacaaggtcttgctatgttgctcaggctggacttgaacttctgggctcaaatgatccttctgcctcagtctcctgagtagctaggactataggcatgtgccaccacatgtggctacagatttttttttttttaaccatgaacagaaattatttaaatgatgatgatgataatagccactgccccaaaaggattacaaatattaaatgaataaggtaagccttacaacaaccttatggggtggacatcattcagattctcaggtagggaaactgaggcacagagcgatcaaacagctccctggcagtcacgcagcacgtgagtgatacagacagagctgagatttgaacctagtcaggcctgtgctctgaacgacagcaatctctccttcccctccacaatgcttccttccaaacctgccccaagttttcctgacccagtcttaattcattcttacaaaggtctcagggaggtggggccatattatcccaggtttcacatgggctcagggaggcttcttgtgagtcttgccacatcaaagaaagaaagaagcagcaagaggtggggctaggattggaacccaagcttgcctgtccttgaacctgtgctggagacgctgaagccccctgcctcccttacatgccactacaaccaccggggttctcagcggcaggacaggaaaagctctgtgccagagggaggagggtgtggcaggtacactacgctgcaggaggggggccctcccacccggcaggaccaaaccattctccacagtagtaaagattaacctctttatgtgacagaaataggtcttcccaagaatagtctttggagctttgaggaagtcttaaatatttcataataaaatgttacacacggcaagaaatagaagcgctagaactttcttcccacactccagtggcttgcttggcaggtacactacccaggagactcaggatttaaggaataggtctggaagtgggactgggagctagatgaagagactaatgccgtattccagagtattctggaaggatgggaaagggaccttctagttgtttctggataaatgatggggaattgccctatgggagggtggggtaagagatcctcactagaaggttctgagaggtatatgcccttcgtttaagagcacaacatggctgggtgcggtggctcacgcctgtaatcccagcactttgggaggccgaggtgggtggatcaactgaggtcggaagttcaagaccagcctgaccaacatggagaaaccctgtctctaccaaaaatacaaaattagccaggcatggtggtgcatcatgcctgtaatcccagctactcaggaggctgaggcaggagaatcacttgaacccgggaggcagaggttgcagtgagccaagattgtgccactgcactccagcctgggcgacaagaaggaaacttcgtctcaaaaaaaaaaaaaaaaaaaaaaaaaggaatacaacagacactggtatgtaatgcaggcacactcatttggggtagcaggaggttaaacctttaagtcttagtcatcccattggctcgtgagcactgagagggtggtgggacatggatcacccaggcttgggattctggggtctggattcgggacctctgttgtggtcagatagaagaaggggtggtgaatttagaatcagaccaggagagtccctggataagagcagggacaatttgggtcacagagtagctaacaggctggggacaaaaggtggggtgggtttggggttctgggcttgagttaggggagagtttccaatgctggctgaggctcatacaggaagccagtctgggaagtgggtggtgacagggtctgcaataccaagtaggagcaggggctctggctaggccggaagccacgtgggcaggatttcctggtataatgggaaatgggtctaccggaggccaaaggagaggctggaatgtgaggctctatcgggttggagctggtagttagatccagaggggaaccagattccaaaacccaagtactcggtgagactaaggatcctgaagggggacggttctacactctaggaagggggtcctgggtgtgggcagggacaggaatatcagagtagcacagagttccttgttccgtttagaaaaggagtggcgactccggatctgaatgggaaccccggatcaagatcccggaaagtagatcccgggacagaccaaagtattgggggtccagactacggaggtgggggggcgatgggagatcccagataggaagtgaatacccgaataggatgagggatcatctagaagaatttggggtccaaactttgaggcagagttctgggtataaatgttaactgccgaacagaattagggagaacccccaagactcgtctaggggactccagactatgaagaagttctagggggtgaatagggaatcccacgcaaaaatcggagcagggagtgggggagcggagatccagggcagggactcagggtcccaatggtactggggtcccggagttgaatcgaagctcctgaaaatccagactgggggggtgagaatcctaggtgtgaacagcggggtccctgggcagtatcggggatcacaactccgaagcggggtccgggagtggggaaagggatgggcgcgcgcgccttacctgatgccgccagcggaagagactggccgtgtcgatgttggggtgcgtctcgtcttcatcatcagacacctcaatgtggtcccacacgctgtagtccaccatcttgccttggcggcccagcccgctccggctcgggtggcggcgacggcggcagcagtggagactaggagcgcggagccccgccccttccgcttccgccgagcgcgggaaaccccgccctgtgtgacgtcacatccctagtaaccgcggcagcggcactagctacccagccagccttaaagggccctgcgtaagtgttccggccccctggagttcccgcagagactccgcgtcatcgggcgctggggctccgctaggtctcctgggggcatatgagtgcgcgcttcaactccgagcccccctcatctcccgccgctccacggtgggcgtttggggtggcagggaggggacggttgatgagactgagaggactgtcccctcagccacgccgcagtgacgtctgcaaggggtagggacacggcgggaaggccctccccctgcccttcgtaaacggggacctaagcctgcgctggagaggggcgcctgatgactcctcggactttctcagcccgaggaggactggacctgccctgggggtgtctaaatcgggggtggtatggccctccccttgcagggttaaacgtggaggggagactgtggccctgccttgggagctggggtttccccgcctcggcaacagccttctccttgtcttccacctcctgccattcgcagcgaggactcgcgcgagcgcgcgcgcgcacacacacacacacacacacacacacgcacacacacacacacacacactttggaatcacccggaccccctcaaaacgggtctcggctccccaccccgctggccgctgggtgtcgctagagtctagcccacggcgcgtattcctggccccgcgcttggtggggggaatcgtggaggggtggaagggggctttccttgtcgtcacagtctggggccacgcatagcccctccccgttcgtcttggggtacgcttcctccgccggggctctaaggactccattactctaagcatgcagggcctcgaccacctcacacttccatgcatcccaatccacgctttgataccaggataataggccgtgttgcagccttgggccaggattatctcagattaaagggtgctccctcgggggtcaggctggataggaggagctccagccactccggtgaggggcgcctcttcctagtctcccctggagccgacgttggaggcagtgcctggagagagcgagcgaagttctccagaagggggaggattccccggtgcatggagcgggaagggccatcggacaaaaacgtcctcccgctgccgcccttccccctcgcgcttcattcaaacccgcgagtgggcgggcaggggcgggggagtccccatctcctacccctccctcttcccctccaccctggcagtccagcacatcagtggccgtcacggcccgggcacgcgcgcgcacggacccacaccccggcggctctcacaatcgcacacacacatacacacacacaccagcaaacaaagggtctggacacccccgtcccctcccgccccccaggccagggagggcggggcatcccctccccaggccccccgcaaggtaagcttggggctgcgagctgcggtggggagggggacacggtgccacagtgggagggggccaggaaggtagggggttccccggctccccaggaaagtcgtacccccacccccaccgtatgccctttagggattcggccccgtcatcagcctgggggtgtttggagagaatcccagatgtcggggattcccggataggcgcgggggtctcttcctggctctggagactggagctgcccagcttcagcaaaacagggttcccggagcctcagcttccagaactggggatagagcgccggaagcttccccatcaaccccaagcatttcctaatctgccagcacagcacctccagccctggggactgaggagagagacccctaagttgctttgcactgtccctctgtccccggtccccatcccacccccatcggtgcaaaccctgctatgtctctcctgcctgtgtgtgtgtgtgggggggaggtttgcgggaattgggaacgctttttggggctacctttgcttcttctgctacatcccatagccacataccactgagctgcggtggggcccggcaggcggctttgccttcctgagtctcaatttcctcctctgcaaagtgggtaatgacacacacctaggattccgcgaaatcgtgctcgcggagcctgcttttgcgccatcattttatttattagctcatttcacatctctttcccaagtgtctacttacgatgtactgggcactgtgaccaggctttggggcagcagcaaccaacaaacccagtaggggtccctgctcctggctagtgagggagcaggatccctgtataaacatacaaatccccgcgggtgatttcagactgtgaagactaaaattctgtcctcggacagagagagactagggaaaggcactcaagattaaaggagaagctgggcacagtggctcacgcctgtaatcctagcactttgggaggccgaggcaggcggatcacttgaggtcaggagttcgagaccagcctggccaacatggtgaaaccccatgtctactaaaaatacaaaaattagtcgggcgtggtggcaggcgcctgtaatcccagctacccgggaggctgaggcagaagaattgcttaaacccgggaggcggtggttgcagtgagccaagatcacaccactgcactccagtttgggtgacagagcaagactctgtcagaaaaaaaaacaaaaaacaaaaaacagattaagtaagacttctggatcctgcctgccttcctccttgggtctgagctcatgagggcaggatcaggtctagaacagtgcctggcacacagtaggtgctcaataaatgttgaatgagcgtggcaccctggtgtgagcctgtagtcccagctactcgggaggctggctggaggatcccagcgacacccatctctaaaaaaaaataaaaacaaaaaataaatccttagctgggcatggtggcacacgcctgtagtcccagctattcaggatgctgaggcaggagaatggcttgaacccgggaggcagaggttgcagtgagctgagatagtgccattgcactccagcctgggtgacaagagcaaaactcaaaaaaaagaaaatcttaaatgaattaaagaggggattagtttaagactagattctagaactgtagattaggaagaaggcttagcataaaccaatccaccccactcccttgaatttgatacaggagacagtgaatcccagaatgtcaacatttctacaaaattgaagatgggcccagcacgatggctcacatctgtaatcccgataattgggaggctgaggtgggaggatcacttgagcccaggaggtcgaggctgtagtgagccatgatcacgtcactgcacttcagcctgggagacagagtgagactctgcctcaccaaaaaaaaaaaaaaaaaaaaaaaagaaggtggttaaagcaagggttgtgaacagctgtggacagagaccagaactgagcactgtgtgcccaggaactcatggtgtccagccagtgcccactcttccccacatagcatatagacacagcactgctttcatctattcaatatttattcagcacctactatgtaccaggtgccagggacacagcaattaacagaacaaaactccctgccccagtggagctgacatttagtggaggaaactgaaatgaaataacatgatcaaaaagatataatgacacattgttattaggatactgatagaaatagagggtgtggctgggtgtttagaaagacttcctgcagaagctgaattcagcacacacacactcaaacccaaacataatcccactaatacacatcacagaaaagtggccatggggactgagtggctgagcagagatttaaacctggaacctgcatttcttttttctttctcctttttttaactaattaatttatttattatactttaagttctgggatacatgtacagaacgtgcaggtttgttacacaggtatacacgtgccatggtggtttgctgcacccatcaacctgtcatctacattaggtatttctcctaatgttatacctcccctagccccccaccccccaacaggccccagtgtgtgatgttcccctcctggtgtccatgtattctcattgttcagctcccacctatgagtgagaacatgcggtgtttggttttctgttcttgtgttagtttgctgagaatgatggtttccagcttcatctatgtccctgcaaaggacatgaactctttttccttccttccttccttccttccttccttccttccttccttcctttctttctttctttctttaattgagacagagtctcactctgtcacgcccaggctagaatgcagtggctcgatcttggctaactgcaacctctgcctcccggattcaagtgattctcctgcctcagtctcccgagtagctgggattacaggcacgcgccaccacacccagcgaattttttgtattcttagtagagatggggtttcaccatattggctaggctggttgaaaactcccaacctcaggtgatccgaccgtcttggcctcccaaagtgctcccaatgagccactgcgcccagccctcctttctttttaaagacaggatcttactctgtcacccaggctggagtgcagtggcaatcgcagctcacttgcagcctcaaactcctgggctcaagcaaccctcctgcctcagcctcctgagtagctgggattacaggtgcacagcaccacacatggctaattttttttttcatttcattttaaagacggggtctccaagagttggaggctgcagtgagctatgatcgcaccgctgcataccaacccaggcaacagcaggagacctgcctcaaaaaagaaaagaaaagagatggggtgtcgctatgttgccctcactggtctcaaactgctggcctcaagcgattcccctgccttggcctcccaaagtgctgggaatataggcgtgagctactgcgcccagcccccggaacctgcatttctaggcactgtgaaatactgttttccgctgcatcttcacacagtgacacccccacacacctacacattcatattacagtcacacaggcacagccaacctcttattcacatagaccgatgtggtattgccctgacacatagattcctgcgggtacaattcggtttcaactatgcaacacttagactcacagaaggttccaccagcccattggcacatgcacagccaggtatgaagttcatgcacatatatgcatgtatttgcacacacatgcctggagtccttcacaatccttccgagacctgcgtcagctttgagcatggagcttgggcagccgtgaatattcagggccatggtgtgggcaggggcttttattctcacttccctgttatttgctgcacatcgccacatccttctgttgaaggaagtggggagtgggcgggatgtcgggctgggtgacatcagctctcctctgccaggccaggccagtggctcccaggctgggctggtagctgacggtgctgacaacatgggtgggggaaaaggactctcgtggcctgagcctgatgccagctgtccagagcagcctgtgctgccatctggacccccatctccagcggcctgctgtccagggaaggagaaggcaggcctagaggcatccctccaccctgagcactcccgggccctgcctccctcgcctgggctgcagccagggctgattgccgcaaatgtgcacttgtgtcctgacagcagtaaggggcatgtctctgcctctctcgcctggccggctggacccctccaacatcgtcttcttcattgctttcttcatttcacaaatccttgagactttgagcaacagaatttgcagagcctagggaaaatgcacacgcagggttcctcttcaagattacaaacaataggccgggcgcagtggctcacgcctgtaatcccaacactttgagaagctaaggcaggggaattgcttgaggccaggagtttgagaccagcctggccaacatggcgaaaccccgtctctactgaaaatgcaaaaattaactgcgcgtggtggcaggcgcctgtaatcccagctactcaggaggctgaggcaggagaatcatttgaaccctggaggcggaggttgcagtgagtcgagatcacaccattgcactccagcctggatgacaagagctaaactctgtctcaaaaaaagaaaaaaattataagtctaaggcaaagaaaacacaagcagggctgggagcggtgactcacgcctgtaatcccagcactttgggaggccgaggtgggtggatcacgaggtcaggaaatcgagaccatcctggctaacatgctgaaaccccgtctctactaaaaaaaaaaccaaaaaattagctgggagtggtggcaggcgcctgtagtcccagctactcgggaggctgaggcaggagaatggtatgaacccgggaggttgaggcagcagaatggcgtgaacctgggaggcggaggttgcagtgagctgagatcgcgccactgcactccagcctgggcaacaaagcgagactccgtctcaaggaaaaaaaaaaagaaagaaaaagaaaaagaaaacacaagcagagtcagggggatgggaaaagcaacaggatatctgaggtctgaatatgttctaggtgtttgaagaacaacaaaggggctggtgggttggccagacatggtggctcacgcctgtaatcccagcactttgggaggctgaggcaggaggatcacctgagccaaggaattccagacctgcctgggcaacatggcaagacaccctctctacaaaaaatttaaaaattaactgggcgttgtggtgctcacctgtagtcccagctacttgagaagccgaggcgagaggatcacttgagcccaggcgtttaaggctacagtgaggtgtgataacatcactgcactccagcctgggcaacagagtaagacccttgtctcttaacaaaatgaaaataggccgagcacggtggcttactcctgtaatcccagcactttgggaggctgaggcgggcagatcatgaggtcaagagattgagactatcctggccaacatggtgaaaccccgtctctactaaaagtacaaaaattagctgggtgtggtggtgtgcacctgtagtcccagctacttgggaggctgaggcaggagaatcacttgaactcaggaggcagaggttgcagtgagctgagattgtgccactgcactctagcctggcaacagaacgagactgtctcaatttaaaaaaaaaaaggggaacagaaataaattcacgtgcattacttcacttcatcctcacaacaaccccatcagatgggtgtgaatattattcctattttacagatgacaaaactgagggccagagaggctgagtaatttgctctaaagtatacagacagagctgagagatactgtgagttgagttctagactaccacaataaagcgagtatcacaataaagtgatacaaaaaatttttggtttcctagtgcatgtaaaaattatgctgacactataccatatgtatattaagtatgcaatagcattatgtctaaaacaacaatgcatataccttaattttaaaatactttattagcctggtcaacatagtgagacctcatttctacgaaaaaaatttaaaaattagctgggcatgttggtgctcacctgtggtcccagctacttgggaggctgaggtgagaggatagcttgagcccaggaggacaaggctgcagtgtgctatgatcacagcactgcactccagcctgtgcaacggagtgagaccctgtctcaaaaacaaaacagaaaaaccttaaaaactttattgctgcccgggtgtggtggctcatgcttataatcccagcactttggctgaggcgggcagatcacttgagcccaagggtttgacaccagcctggccaacatggtgaaaccccatctctaccaaaaaatacaaaaattagctgggcatggtggtgcacgcctgtagtcccagctactccagaggccgaggcaggagaatcgcttaaaccccggaggcggagattgcagtgagccaagatcacgccactgtactccagcctgagcgatagagtgagaccctgtttgaaaaaaaaccaaaaacaaaaacaaaaaaacctttcttgctaagaaaagctaaccatcatctgagccttcggcaagtcataatctttttcctggtggagggtcctgcctcaatgttgatggcttctgactgatgagggtggtggttgctgaaggttggggtggttgtggcaatttttaaaaataggagaacaggtcgggcggtggtggctcatgcctgtaatcccaacactttgggaggccgaggcaggtggatcacttgaggtcaggagttcaagaccagcctggccaacatggtacaaccccgtctctactaaatatacaaaaattagcctagcgtggtggtgggcacctgtaatcccagctacttgagaggctgaagcaggagaatctcttgaacccaggaggcagaggttgcagtgagctgagatggcaccattgcactctagcctgagtgacagagcaagactcagtctcaaaataaataaataaataagataataataataatacttgaaagtcaaatgtactccttgatcagtgggctgcagaatggacgctgtgttagcaggcatgaaaacatctccttgtacatctccatcagagctcttgggtgaccagttgcattgacaatgagcagtcatattttgaaatgaaacttttttctgcacaggaagtctcaactgttggcttaaaatattcagtaaacagatgtgctgtcacccaggctttgttgttctatttatagctcagaggccaagtacacttaacatcattctaaaggtccccaggattttcagaatagtaaatgagaattggtttcaaccgaaagccaccagctgcattagcccttaacaagagtcaggctgtcctttgaagccagtcattgacttcacttctctctagggtgaaagtcctagttggcatctacttccaatagaagactattttgttgggcaggcgccgtggttcacgcctataatcctaggaattagaaaccagacggggcaacatggtgaaaccccgtctctataaaaatacaaaaaattaggtaggcgtggtggcacgcacctgtaatcccagctactccggaggctgaggcatgagaatcgcttgacctgggaggcggaggttgcagtaagctgcaatcttgccattgcactccagtctgagcaacaggctcttcccatccccctgactctgactcagaaaaaaaaaaaaaaaaaatagaccaggagctgtggctcacgcttgtaatcccagcacttcggggggctgaggtgggcggatcatgaggtcaggagatcgagaccatcctggctaacacagtgaaaccctatctttactaaaaatacaaaaaaaaaaaaaaattagccgggcatggtggcaggtgcctgtagtcccagctacttgggaggctgaggcaggagaatggcgtgaacccaggaggtggagcttgcagtgagccaagatcgcgccactgcactccagcctgggcaacagagcgacactccatctcaaaaaaaaaaaaaaagactattttgtctacactgaacaatttgttgttgattgtagccaccttcatcaataattttagctagatttcttctgggtaacttgctgcagcttctttctctctctttttttttttattaaaacatgtttactttttaggccaggcatggtggcccatgcttgtaatcccagcactttgggaggtcgaggtgggaggtttgcttgagcccaggagttccagaccagcctaggcaacatggtgaaactctatcactacaaaaaatacaaaaattaaggccaggcatggtggctcacgcctgtaattctagcactttgggaggccaaggcaggtggatcatgaggtcaggaatttgagatcagcctgaccaacatagtgaaaccccgtctctattaaaaatacaaaaaattagccaggcgtggtggcaggtgcctgtaatcccagctactcaggaggctgaggcaggagaatcacttgaacccgggaggcagaggttgcagtgagccgagattgtgccattgcacttcagctcgggcgacagtgcaagattctgtctcaaaaaaacaaacaaaacaacaaacaaacaaaaacccaaaaaacaaaaattagctgggcatggtggtgtgtgcctgtaatcccagctactcaggaggctgagatgggaggactgctttagcccaggaggtcgaggctgagggccacaatgaatgggtaccatttcttgctctgtttgctggagaatacaggttacaatcagagtggtgagtgctttaatgggggtagaaaaacctgcagtgggggcccagaacatggactggggcagtctggctgaaaaatggaggtgacctttaagctatctttttttttttttgagatggagtctcgctctgtcacccaggtcacccaggctgcagtgcagtagcatgatctcagctcactgcaagctctgcctcccgggttcacgccattctcctgcctcagcctcccgagcagctgggactacaggcgcccgcccccgggcccggctaattttttgtatttttactagaggtggggtttcaccgtgttagccaggatggtctcgatctcctgacctcgtgatccgcctgtctcggcctcccaaagtgctgggattacaggcgtgagccaccgtgcctggcctaagctatctttatacattcatccatttgttcaacaaatgtctgttgagggcccaccaggtgctaaaggctaggttgaagaaatgatgtttacattagtttccattaatttacattgaactgaagtgctagctaaggcaataaggcaagaaaaagaaataagaaccagactgagcatagtggttcatgcccagcatgaacatgggttcatgtaatcccagcactttgggaggctgaggtgtgaggagcactttagtccaggagtttgagaccagcctgggcaacatggcaagaccccatctctacaaaacaacaaaaacaaaaattagccaggcatgatggcgcgtgcctgtagtaccagctgctactctggaggctgaggtgggaggatagcctgagcctgggaggtcgaggctgcagtgagctgtgcaatggtgccactgcactccagcctgggcaacagagtgagaccctgtctcaaataaataaataaataaataaatattaaaaaaaataaagaaatgagaactaggctgggtgtgatggctcacacctgtaattccagcactttgagtttgagctttagtttgagctcaggagtttgagaccagcctgggtaacatagtgagaccccagtctctatttaaaaagtagaaacaaaagaaccaaagtaggggataaaccagctagtacacagtagaactgttaggaacattacactatcaggctctcaataataacctgacattgaacaggttattaaaagcctattatgttccggattctgttcaggacgctcaggagatagtaaagaataatactacattattgttaacataataattaaacaaagttttcgtgccctcctgcagctaatattccagtgtgaggagacacagacaataaatgtaataaacaaattacatagtgtggtatgaggggggaagagcgggaaaagggggaccagaagtcctaggaggttgtattataattttaagtgggggtggggtaagaaagaaagaaatgcctgaaaggatgagatataagcaaagacctaaaagaggtaagggacctgcggattttttttttttttttttttgagatggagtctcgatctgttgcccaggctggagtgcagtggcccgatctcggctcactgcaacctccacctcccaggctcaagccagtctcctgcctcaccctcccaagtaggtggaactacaggcgcctgccaccacgcacggctgatttttgtatttttagtagaaatggggtttcaccatgttggccaggctggtctcgaactcctgacctcaagtgatccacctgctttggccttccatagtgctgggattacaggcctgagccaccgcatctggccaacctgcggatatttgggggaagagttccaggtggacagaactgaaagtgcaaagggcctgaggcaccagcatgcttgctgtgtccagaaacagctagaccagtgtggctggagctgagggcaggaaggtgactgggcgttatctagcaggactgtgtgggccacgcgaggactttgacgtttcctctgagtgaggtaagagctattagggctctgagtagaggaagatcatgatctgaatcgagttctaacaggctcccacagggtcagatgttaccatttattaaatatttactgagtgccagacactattctgttcaatatggtttgatctcatttcattctcacatggaccctgtagggaatatcattccatttcacagaaaagaaactgaggctcacagagtttaagacactgacccatggccgcacagcaataatcttcagcgcctgggtgccaaggtaaagtaagccagcctctccctcccccaagcatttcagacaaggatcggtggctgcagagcgcacccgtcttcgggaacggcgtctgtgtccctgtctgtctgtttctatttccacacgtccctgtctgtctccacgcgcctctgcctgtgcgtcccccatctgtgcccaagccgccgtctctctgcgcccggcccccgcacatcggagctatttcgggtttaaggcttaaaagcccaacagctcggaggagacgcttcctccggcccccggctcggaccacgcgccgcacgcggccagctctgggagctcccagttttttctgcgggatccccgagccggggaagcccccgcgggaggaagggtgggggctggggcgacccgggcccggaggctctcggccccccagtggccaaccccggcattgacgccgtcaggagcccagccgtgcgtcagctgtcgccctggcaacgggggcgacgtcaccacattggtggtgcgtcagtccgctgacgtcacgccccaggagaggcaataggcaagtggcgggggcgggttctaggcccgaccggcagggggagccctggggcactgatggcagatgcgtttggcttggtcttgtaggaggccctggccctgccgacatggccaccgcagtcccaacggcgcgctaggttggcgagatgaagaggagtcgcagtgccctgtccgtggcagggaccggggacgaggtgcgagaggaggggcttgggctaggggcggggcttcgccccttgggggagactagcgccctctagtgaccacggctatttcctgaacgtggcttcactacctccaagctgtgaggagtttggtcccctcgtgcctcagtttacccccttgattccattttttctcctgctgccctaagaggctctcagccggcccagggacagcaggcaaaggcttctcaaatgaggagaggattttggcgaggaggtgggagggggcgctaggggtggtgaggtcttgagagtctcagatgtgagggatgggaggggggcattgacattaagaccaagaggggccctcttagacgtggaggttgggaagagaccctaaaaaggtgatgtgttagagaggtctcacacttgagacagaatgtctagatgtgacagaccccaaggctggggcatcgagaggggaccccacaaaaattatggctgagaaggggcactctcagacctaagggatggcagggcaccctctgtgtgaggggtcagcgagtggctcacacgtgaaggggagcctataccgccattaactactcccttagacagctaggtaggggtgttcttggggagaggggctcagagcttcccagccaggccacgcccctattccactttgtccctccccagaggtcgagggagacccccgaatccgaccgtgccaacatgctgggggccgacctgcgtcgccctcgccgccgcctctcgtccggtcctggcctgggctgggcccagcctgagccctcggaccctggggtccctctgccgccacggcccaccaccctgccgctgctgatcccaccgcggatttccatcaccagggccgagaacgacaggtaggtaggagagggagcagagtgggaggtgggttggggaggcacagtgccaactgggctaggtccagccaccagcccttcccgatctccatgctccctgccgtttgcaaaactagctgcaacttgtcctgtggcgggctgtgacacccctaccccaaggcacccttcgcaggctctaggaaccccttatttcattttccagctgcctgagtcagcaaggggcaggactgaggaaaggggtgtcatgtctccagcccccaagatgctcccatattcacagagctggggcaggttgatcaggcggctgtgcaccggctttcatgtccccgcctgggaggatcaggtttcttctccgccttgaaggggatggtggagtcttggaaggggtctggactagtatttttctttctcctggggagatgtgagaaatatctgcgagctctgggttcacacagcacctcctgctgattctcatctggggaccttccaggtacccaaccagtttcccagagtactcaacccccctcttggctcaagaatgagctggaaagtcagacagctgagctggtcctggcttctggccggcccctgcccccatgccctcctctggtcaccgctttcggcagttccaatccacccccacccccatctactcaattggagggttccagggtctctgtttccgtcatggtccaatggttcatttccagatagggagagcaagtgactgtctctcgcccctggagctgcttaattatacctctccacgcccatcccactagcctcaggtccagatcagtttatcccccagctcaggccaccgctcctcgtttcctccttcttctgcaaccccagctgtgtcctgacacccccacccacctcacattacgcactcccacccgcttccagatctctaaccaacgttacagcataccccgccaagaatttggcccagcccaggactctcaaatatgatctggggagaactcacagcccctgcaaattccctagaagccgttttgagtgtgtaatggggggggtgttcctgagagaagtggggaacacagttttggcccttggaatacccggcggctgctgatgggggggccggtttttgctcggcgttcgcccacgccgggagccccctctggcggggagaaaagtggctgtgggggttgaagaccggcagtcttttttttttttttttttttttttcaaataaggagaagggcgcggggggagggcggtggcaaacggcatcgcgtgccctggggagcccgtgacagggggcgcacgggggcaggggtctggtccccgggtcccgcagcagagcagtttcgcgttcgagctcttatcggcgtggggggggggggcggtgggacacgcgggcgcgtgcactccccccgcccagcagccatccttgggggggttgagggggatgggggcgcactcggatcccgctcgctctctgcttgctcgctcggcgcggcgctgggggaggcgggagcgtgagtcacggcgactcccgatttaggtgccggaaggggggctctgctggcgggggccgcagggaggaggctcgcctgtttactcgcctgaaaagggcacgggggtgcgctccgcggctacctgggaccttcctcagtttacctctggcagaagcgctttagaagaggcagcgatgtatagagcggtgggccggcagctgcggtatccgccacagggtgtcttcctggagccacaagggaaccaatgggacacaccccagaaacaccccagaggccccaggccgaccacacacatacactcacgcacacgcacacactaacatacatagacgtcctccgacactacagtcagacgacagaggccgaatcgcgtgcacaactccgcaagcacacaccgaccacaaacgcatccaagcgcttgagaacacattcacagtccccaggccacctgaaaaaagaccacgtagggatgcacatcctccaaataggtagcacatgtgcgcacacatccttcacccacagacacacacagttatacacacagccaaatccagagaaacgggcagacaacagcagccaaccacgtgcgcacacacacttccagccgacactgaaaacacagacaaccctcggaagaggccacgtgcgcgcacatcccgccccgggcccgcaccatcactatcctccgacgcacagacaggagatcccacacactctgccgccgcccgctgcaggtaccgcgccggtggcactaggaccactcctcaaaaactgccccccgccaggggtagcggcgaggacacgccaacaccggactccgccctcgccatgatggaccgactgactgacactctggcaaccagtccggtgtctgcttccagatcggattaaccgtttaactccttcgtgcctgtgcgcgccgcggccaagcagggtgctttgaagacagacgagttccagcgccccctcccagcccggagcggggatctgcgtgggcgggaagggcccccctccttaggtagctgccccccgctggcccggacggaggaggaggggggcggcgctgacagccgcggcgggcggggggcggggaggggcgggacggggcggaggagccggggctggcgccgagcgggccgcggaacgcggagcgcggagcgcggagagcgccgccgggcactgagcagagctccaggcgccgaaaggaagctgcagagcccggcccgggggcgattggcccgcagcgcccccgggtctgtccccggggcgccatggccctaccgcggccgggcgcacccgcggggccctgggctcgctggcttgcgcgcagctgagcggggtgtaggttggaagggccagggccccctggggcgcaagtgggggccggcgccatggaacccccgaccgtcccctcggaaaggagcctgtctctgtcactgcccgggccccgggagggccaggccaccctgaagcctcccccgcagcacctgtggcggcagcctcggacccccatccgtatccagcagcgcggctactccgacagcgcggagcgcgccgagcgggagcggcagccgcaccggcccatagagcgcgccgatgccatggacaccagcgaccggcccggcctgcgcacgacccgcatgtcctggccctcgtccttccatggcactggcaccggcagcggcggcgcgggcggaggcagcagcaggcggtaagactccccgcggcggatgcgcgcggaacggatgggcgcgcagggaggaggcaactcgagctgccggccgcagggggcgctaggatgcgggtggggtcggtttggctggcgggggcggagggaattcggctgcgggggcgtctgggacctggcccctggttgtgcgctctacgggaggcttcctgctgaagcccatcctggggtccatttagggggcgccacgctgcgcgtggtgttaacgaggtctgggttggggaagggggctgcacacttaggggtctgtattcttggtgacagtgcagaacagctgctaagctgggaaccacttggagggaccttcctgggggcactatactgagggctagattcgcagtgtttggggtactcttggagcactccataagggggtgcctgctaggaccaggatctttacttcagggtggggtgctctcagggtccttctaggggatggaggactctattgcggggatgttagtggactcctcctgcagcagctggggtcagaaatccagagggtgcctcttgggggagcactgttttgggagccttgcgttagattggagttcccctctcagggcaagagtgttagcgttaagtagctgttcagaggcaggaaacagtggagggggggcgcagtcccagcacagagggaaggagtccctgactgcagaggtgacagcatagtgagggtgcatgtgtgttgagcttggtctcctctgagggtattctccgattgacctccgtttgctccagctgtccgggtatgaccagctgtggctacctcagttgtgtgctctgtgtgagcttctggggtcttgtgatggtgacacgatgactctgtgtcctccagggacagtgtaattgtgacagtgtgactgtgtatttccagggtagtgtgactgtgtgtttctgggacagggtttgcgacagtgactgtgtgtgctccaagaatgctgtgactgtcacagggtgactgtggcctcatgggatgcagtgattgggatagagtgactgtttctgctcctaggacagtgattgtgcaatggtgttggtggtctagggacaatgtgattgtgacagtgtcatttctggcatgcagtgattgtggcactggggtgtttacacttggggaacaatgtgattgagttcgtggaacagtctgtgctccttggacactgtgattgaaacacagtggctgtgtgttagtcttcaccaggtgctcacgtctgagcgtcggtgctctgacatgtggtctgtgttccctctgcctggtgtatcctaagaactggtgtcctctaaccacctggtgttcttagttattgttcctcctctgatggtgctccagggtctgattgcttgtgctccagcgatgtgtgcaactgacagctttgcccgtgtgctctacctggatgccccactgctggggatatcaccaagacggtcagatttgggctccttatccctggagctcctgagtgaggcctctctaagatgtagccctactcttcctaagtctctttgggggtcttcagcagtcattgcagccctccaggccacccccacctctgttctgatcaccccccagccccagtccccctgcacccttctacccaccaggaagcaagtgtcacgggcccagcatacatgggctgacatttcccaaagggaactggagagaggctgaaggaagagaaagttggaatcaacagaaaatgctaaaactggggcagggggccaaactggcacaggtcactgtcctaagacaccaaggggtgggtgaagtgaagtaggttccaggccccatttctttgcaaggctccagggactcctcctagcctggtctctggggcactgagtcttaggggacagtggctgagtggtaataatcatcattattttggtgggtatccatctcgcaatggctcaccctccggctccatgccagggacttttccatatgcatcctcatccccagtgccctgggtattccagcagggtattcctgctggcatatggagaaactggagcccagagacaaaaccctttctcttttttttttttttttttttttgacagagtctcctctgtcacccaggctggagtgcagtggcgtgatctcagctcactgcaacctctgccttccggattcaagtgattctcctgcctcagcctccggagtagctgggattacaggcgcccaccaccacacctgactaatttttgaatttttagtagagatggggtttcaccatgttggccaggctggtctcgaactcctgacctcaggtgatctgcccaccccttagcctcccaaagtgctgggattacaggcatgagccactgcacccagctaaaccttttctctttctcacccaaactcacacaaccaggagatgggggagctggaattgcaacgcaggtccgcccaattcctgtgcatctttgtataagtgtcttgccctctctgagccttaattttccagtctgtagagtggggcttttgttggcactgccatgtgggggtcactttgagggttctgtgagcttggagatgtgtgtaaaggacttaacataatcagtagatctccattcagggacctggactaaggaggggggacctgggtggatcccatttctccagggtgagtagaaaaaaacaggaaccttaaccacatccccacgtagactcgggtttctgtttcactgtgggcctgtgcacccttcagtgtctgtgctgaggtccaaagctgggactgatgggtgggctgtagctggcatcagtgccagggtcctcccccattcccagggaaaaggaggaaggtgtctgatggcaacctcaatgcttagaacaggcatttcttcaaaaagggggtttttaccagggcacatacaggattcagtgctccccacactggagttcatccagctaccgcaaaaggagtccagcgagctcccccgatttgggtcaaaggaatccccagagagagggcactgcccacccccaaccggagatgtcatccaaacctcccctccagacctgaagatgtatgagacggctgagtcacggcacagccacgatctgtcaagaggcagatggagagggaggaagaggaggactttggtggtgggggtggggagctgtctgaactggggacggggccaacatacggaccctgcgtcccccctccctgggccctaaaacttccccatcgaggtgggggcacagtgtggccccaggagcaggtggaggcagccgagctggggtatccgtctggtcgctggtctctgtctccacttgggtcctcgcctcccccttgtccctggcgctcccaagtccctggatgtgggttgggagcgggtctccccgcgcgccctctgctggacgacgaggaaggcacagcctgggtgtgcgctccgagcgcggacctgctccagggacgccgccagtcccggagcaaagcaaagtcgccgccaccgtcgcggcgcccggtattattattttatgcttattgagcgtcctggagagcgggcgccaggccggctgaccgcaggctgcgtgtggggtcctcgccctcccgggcttgggaccaggccgctttccccatgcgccagcccctgccacacgctgcggggactgtcgtctggaggacagggaggaacctggccgaaaagttgcagccgtggagttcccgtcccgcctctgcgcgcttgcccggcaggccggtgaaccccagcatccttggctctgcgcttcctgcccgggaaacagagaccatgggacttgcccaaggtcacacagcgaggaaggtgagaataggagttaaaaaccagatctcggccaggcgcggtggctctgtaatctgagcactttgggagaccgaggtgggcggatcacgaatgaggtcaggagttcaagatcatcctggccaacatggtgaaaccccgtttctactaaaaatacaaaaattagccgggtatggtggcacacgtctgtaatcctagctactcgggaggctgaggcaggagaatcgcttgaacccgggaggcagaggttgcagtgagtcgagatggcaccactgcactccagcctggcagcagagcgagaccctgtctcaaaaaaaaaaacaaaaaacaaaaaacagatctgctccactgcagaccgctgggtaacattcacatggcagccctgcccgctgactcgctgtgtgacttggggtcagtgcttgtgcctctcggagcctcagtttcctcatcagtcaaacggggctgaaaaataagaactgtccacccccagggctgtggtgaggctgatatgtttgacgtaggtgctgggcagccaggagctggtgttctgagaaagtacttcctcaaatgacatcagcagagagaaagggggcgtcccccaaaccgcaaacccggctggtggggaaggtgccccatatttcattggtaacagattgactgcaggctcttatgactttaggaaaactggggctttggacctgggagagccacagtctggcagggtgagaacagaattgtgagggcatctgagcccactcttttcattgtggagtatgaaagagttcaaatctggctgggcgcggtggctcatgcctgtaatcccagcactttgggaggctgaggcgggtggattatttgaggtcaggaaattgagaccagtctggccaacatggtgaaaccccgtctctactaaaaatacaaaaattagccaggtggtagtggtgcatgcctgtaatcccagctactggtgaggctgaggcaggagaattggttgagcctggaaggcggaggttgcggtgagccgagattgggccactgcactccagtctgggcgagagactgagaccctgtcaaaaaaaaaaaaaaaaaaaaaaaaaaaaaggaaggagggaaggaaggaaagaaaagagttcaaatccacttttggccaggcgaggtggctcacacccagcactttgggaggctgatgtgggaggattgcctgaggctggagtttgagaccagcctgggcagcatggtgagaccctatctctacaaaaagaaaaaaataaaagaagtaaatccagcttttgtcctggactcgctgtgtgaccttcacctgtcagagcctcagtctcctcatttctagcagattcgttcattccacaaacactgagcgccttcagaactgtggctgagaatgctgtagaccaagtttgtccaacccgtggcccaggatggcattgaattcggcccaacacaaattcgtaaactttcttaaaacaatgagattcttttttttttccctctcattagctattgttagtgttagtgtattttatgtgtggcccaagacaattcttcgcctttcagtgtggcccagggatgccaaaagattgcacacccttgccatagacacattccctgctgccctgaaattgtcagactagagggtgaagcagaaatagcaagtaaagggctgggtgcggtggctcaggcctgtaatcccagcactttgggaggccaaggcaggtggattacttgaggccaggagttcgagaccagcctggccaaaacctggcaaaaccctgtctctactaaaaatacaaaaattagctgggcgcacgcctgcaatcccagctacttgggaggctgaggtgggaggaggattgcatgaacccaggaggcggaggttgcagtgagccgagattgcgccacttcactccagcctgggtgacaaagccagactccgtctcaaaaaaaaaaaaagaaatagcaagtaaagctgtatgataattcaagatggtcacacataggatatgaaaaaaagagggatcctgaggtcagggaaggcctctctgaggaggtgacatttgaacaaagacccaaataaaatgagggaggtaagggccgggcgcagtggctcacacctgtaatcccagcactttgggaggccgaggcaggtggatcacgaggtcacgagttcaagaccagtctggccaggatgttgaaactccatctctactaaaaatacaaaaattagctgggcgcagtggcaagtgcctgtaatcccagctactcaggaggctgaggcaggagaactgcttgaacccaggaagtggaggttgcagtgagccaagaccgtgccagtgcacttcagcctgggtgacagagcaagactccgtctaacaaaaaacaaaagagggaggttgctacatgggtgtctgatggaagagggtgccaaccagagggaagagccagtgcagaggtcctgtggtgggagtgtgtctgatacgttggaggcaagtgtgtctgaggcagagtgagcgaggaggcagtggaaaaaaaggagggagcgaggtgacaggcagctcatgtaagggctcatagaccattaggccatgatcaaggttggctttaggcctcagtttacatctggcttcctaggacgggacaagcatcattgggctggaaggaaactcatccataaagggcttgtgtagcctcatggctaaaattcctgtctctgaagccagacagctgggtccataatccagctctgatctttctagattgggagaccctagccaagtcactcctctctgggccttggcttccccgtctctgaaatgggcctagtaaaaaccgtattcccaagggctgatctgacgaactggcaaaacaattcagggaagctaagggcattgaaaccttggtcggtgaacaaaaatgcatttctgggacaggtatagtggctcatgcccaacacactttgggaggctgagagggaggcggatcacttgagcctgggaggtggaggttgcagtgagccaatatcatgtcacttgcactgcagtctgggtgacagagtgagaccctgtcaaaaaaaaaaaaaaaaaaagaatatcacctggtgggtgtctggtgggtactttgtgaggattaaatgagatcataagaccaagtgtggtggctcacgcctgtaatcccagcactttgggaggccaaggcgggcagatcacttgagtccaggagctcaagaccagcctgggcaacataggaaaaccccatctctagaaaaagtacaaaaaattagtcaggcatggtggcgcacatgctactcagctacttagctgctcaggaagctgaggttgaaggatcacttgaccgcaggaagttgagactgcagtgagctatgatcgtgccactgtactccagcctcgatgacagagtgagatcctgtctcgagagagagagagagagagagagagagagagagagatattgagagagagagagagagagagatcatagctagaggcactggatgcacaggaagctttctaaagggttagttgctatcatcaccatcatcgtcattatcatcatcatctataccctctagctagtatagtgatttgcatattataagccttcagtaaatatttgtcaaatactgataataactgtagctcatattgagtgcttactaggttcagacacttttctgagctttttatgtgtccatccatggggtgagtggtagtattatacccattttacaactggggaaactgaggctcaatgaaatgaagtgactagcccgagatcaaatggctaagaagtgccagaggccacacgcaagcccaggcttcctcactctgggccccatggcatcagagccaacactagagaaggaaggatatttcacagaggtggactcgaaaatagagattcactgttgggcgcagtggctcacacgggtggatcacttgaggccaggaattcgagaccaacctggccaacatggtgaaaccccatttctactaaaaatacaagaaaaatttgccaggtattgtggcacatgcctgtaatcccagctacttgggaggctgaggcacgagaatcctttgaacctagcaagcagaggttgcggtgagccaagatcgtgccactgcactccagtctgggtgacagtgagagactgatgaaaaagaaagaaagaaagagagaaagggggaaagggaggaaggagaaaggaaaggaaaggaaaggaaggaagaaatgaaggaaggaaggaaggaaaataaggaaaggaaggagaaaaggaaaagaaagaaagagagggacggaggggaaaggaaaggaaaggaaagaaggaaggaaggaagaaagaaagaaagaaagaaagagaggaaggaaagaaagaaaagaaaatagagattcaccctcttttctcttttttttcgtgagacagggtctcactgtctcaagatggtttagtggcaccttcataactcactgcaacctcaacctcttggctcaggtgatcttcccacctcagcctccaaagtagctgggaccacaggctcatcccactatgccctgctaatttttgtcatcttttgtagagatgggatctcgccatgtcacctgggctggtctcgaactcctgggctcaagtgatccgcccaccttcacctcccaaagtgctgggattacaggcatgagccaccacacctgccttctaggggtgtcttaagagttgtaagacacatctcagaagctgtgggtggcattctaggttgtccccaaggactgtggggtgcatcttgggattctgttctagggtgtgagactgtcttaggagctggagaggaatctagttgtgtccctggggtctattggggcaccccagattttgctggcatctccatggttactagggcatcccctgagtctgaaggcattcccgaggttgtcttggggtctcagcacttgtgggggcatctcagagatgctgtagaaccattcagggattaagggacatctgagggactgtggaggtgttcctggggtctgtggagaactctaggatttggtgggaacctatattcggtctatgaaaatggctctgtgggtgtgggggattctgggggtactgagggagggtctatgcatgatgggatgatgagagttggggatgatggggagctctggaggaattttgggacatctgaggaactgtggtgggggttctgggatctgaagggttttccctgggctctcagagcaccactggcagggagtttgtgggagtgcccccagagatttgggggcatccctggcatttgtggatgcaccctgggattctcagggcactcctggggcttgtggcatgtcccagaaacagtgagaatactgctaggattatgggggcatctggagagctatgagagtgccctagggtttatgagggtgtctcagaacacctctaagttgtgctgagaagccccgggatttgggggggtacccctggacttcttgtgtggggttgtctcagggacaatgagggtgctccttgggattctgagagactgtggggtggctcctggggcttgtggggcctgtcaacaccacggggagtttgcaggagtgtccccacagatttgggggtgtccctggtgtttgtggggacgcgtccggcgattgtgaggacattagagccaacgcgggcggctttggggtctgcgggagagtccccaccagagccgtgcgggcgccccagacccgccccgccctgggggcggctccagcgcgaagccggaagggccgaggcgacagggcggggtggggcccgcgggcccggggctgggcaggcggcctgcgtgggcctggcggggtgggcggcgcagctccccagcgcccgccgaggcggggccgccccgcggccatggcgcggccgcgcggcctaggccgcatcccggagctgcaactggtggccttcccggtggcggtggcggctgaggacgaggcgttcctgcccgagcccctggccccgcgcgcgccccgccgcccgcgttcgccgccctcctcgcccgtcttcttcgccagcccgtccccaactttccgcagacgccttcggcttctccgcagctgccaggatttgggccgccaggcttgggctggggctgggtaagtgcagcgctggtggccgtgggttcaagtcgcccctggccacctggcgcactccagggtctagggttcgtggctcactctctccagcctcactttcctcttctgtcacatagcagcgatcaaaatcatccctgaccgccagggttgccctggagacctctgatagggcatgcagtagacgtttaataaatgttgcatccttcccacttcctgtgcaaacctgaagctgcggtcacgctttggaggagtgagggcgacctgccatccaggtcatgtgttcatcctggggtatgtgttcagttctgtcagcctcagtctactggcctgtgaaatggggccagtcatgccttctgtgggtggccttgcggtgaggcttggtgtcactcctagtaccgggccacagagggcaaatggaagttccctttctggccagacggggtgggctgcgggggcttgaagtctgggagtgacaggccccgaggccacatccagtctggctttctaatgtccttatatcctggaggcagaagttggcagcccggagttgggcactggctggccctgggggcttctccgggtcctcagcctccccctcttccacctactttccacgtgcaattgaggcacagactgaaggagggcacggcggggcaggaccgggcccagcgactggccccaggaacgaaatggggcggggacagaagaggaagaggggccagggcctttgggagccccgcgtggggtccgcagggtgtgtgtagggaaatcgttgcttctctccgggtctctctctctgcgtcctgcgtctctgtctccacttctgtctcttctgtctctgttttgtttctccttcccaccgctgagctgcaccttcccctcccctgggtttatgtcacccggccccacactcgagtcccgtttccccgggggcgcacggcgatcagcgatcagagacctcgagcgggcccagctcgacgtcagggcggggaggggggaaaggcggggccggaggcggtggcaggagggcgggcccggagccgggaaaccggagccccggggcaccccagaggcctaggagggaggagacgggggggggggggggaagtgtgcgtccgactccgcaggacccctgcagggggaggcagacagagcgcccgtgcgctcccctcccccgtgcagacccgggaacgctcgaccgcccggggctgtccctgggggggtcaccagaggcgtggaggcggtgccggcagtggaggccgcagacaccttgggcctggccagcagcgcgcgccacaccgccctgccgccgtccccatgcgcgccccgacgacggcgcttggctcccatgcgctccggtgcagcgccccgggcccggccccggccccctgccctggcactgccccccacgggccccgagtccctgacccacttccccttcagcgatgaggacacccgtcggcaccctccgggcagatctgtcaggtgggtggcccgtggccagtcagtcctctcttttaatactgaagggcactggctgtgctgggggggtgggggtgctgagtctacctgggtgagtcccctaagtggcttccaggatctggctggggccccaccccctttcctggctctaaaggcctggggtgctgctgagggcttcttgaaggtggcagccctcaaagtgggtgctgggtccattcctgcctatccaaggtaggacccgtcaccctctttgtgtccttaaacctgagcttctggcattcactttggctgcaaatatgggtgtccagcgtcacctgggctccactcccaggccactggcctagaaccagatccctaagtccctgcctggctcagtgtctccagccttaccttccccaccccctctcatgctggagctgccaggctgaaaaccaagctgggttgggggtggggaggggagattctgggtctcatggagggtgtttagaataggctggactgagctggggctgtgagtggcctttaagttctcagaattctcaggggtttctagccttgttcttgctttcctgctccatggtctctaacacagacacacacacagggccgcacacagggcaatccgggtcacctggtgtttaccgtactaggtatgggtctcctggctgcaccaagaggaccctgcagttgactcatggccacacacaggtgacacacagaccacagcaaccctggcccagccctcgcacatcctcgtctacactgcgttcctccacagtgggggacactgtattttggtgagacacattctcacaaaaatacacacccagggcccacacatgttcctgtatgctgtactcccacctgcaccagatacacacaggaacgcaccccgtgcccacacaggggtcagggactgtcacagtatcagtgcgacacggtctcataaagtcacccagactcagaaatacacagataaagacacagagatgcacacaggcacccatgagcacccagcccctgctcacacaggcagatgtgcgatgccacagagatgtctatgtgtgatgcccgggggcacacagacctccctctcccccagtctcttacatactcagccccccaaagagctgtgtcacctggcactacgcgcctgcctgggagacacacaccagcacccgccttcaacctccatgtgaccttcacaaagcaaatgccaggcctttccataaaggctgcctggcaccacctacaagtgagtcaggtggaaaagcacggggagccgggggagacaccaggcctgcctgccctgtgcgccccgggggaagacactcgtcgcagctttgtagctcagctgcctgggttcaaatccacattctaggccgggcgtggtggctcatgcctgtaatcccagcactttgggaggctgaggtgggaggatggcttgagcccaggagtttgagaccagcctgggcaacatagtaaaacctcatctctacaaaataaataaattttaaaagaaatccatgctctgctactaataaccatagtatttatcctttatgtgcctcagtttctttctttcttccttccttccttcctttctttcttcctttccttctttccttctttctctctttcttcctttttttttttttcagggtctcgctctgtcacccaggctggagtgcagtggagtgatcttggctcaatgcaacctctgcctcccgggttcaagcaattcttgtgcctcagcctcccaagtagctggcattacaggtgtatgccaccatagcccagctaatttttttgtatttttagtttagatggggtttctctatggtggccaggctgatctcaaactcctggccctaagtgatccatccaccttggcctcccaaagtgctgggattacagacgtgagccaccgtgcctggcctcagtttctttgtctggaaaatggagcattaatgcatgttacagtatagcacaatgcctagcatgtggtcttcacataagtttgttttttttttctttcttgagatggagtctcactctgtcacccaggctggagtgcagtggtgcgatcttgcctcactgcaatctgtgcctcctgggttcaaccaattctcctgcctcagactcccaagtagctaggattacaagcgccccgccaccacgcctggctaatttttatatttttagtagagacaggtttccccatgttggccaggctggtctcgaactgctgacctcaagtgatctgcccgccttggcctcccaaagtgctgggattacaggcatgagccactgtgcccagctttttttttttttttttttttttgagacagcatctctatcatccaggctgggatgcagtggtatcatctctgctctctgcaacctctgcttcccaggctcaagcgatgctccaacaggcatgagccacggcgcctggccatagttcttgttattataatctttaccaatgtgttcgtttcccccgcccccgctccctagcttgtttgtgtcccgtcagtccctgcagtagtcatcccccaaggcctagactctccctgggctgcatagccctcaacaagcccaatttcatgctcccaaaagccctggtgggaaggcctaggggccacgtggagggggaaacaggtagcaacttcatctgaaagtgtcaccaaatgatcagcctgaggccagatgcagtggtcatgcctataaacccagcattttgagagggcgagactttgggaagcagattgcttgagtctaggagttcaagaccagcctgggcaacatggtgaaaccccatttctgcttaaaaaaaaaaattagctgggtgtggtggtgtgcgcctgtggttccagctactcaggaggctgaggtgggaggatcgcttgagcctgggaggctgaggctgcagtgaaccatgatcgccccactgcactgcagtctgggtgacagagcaagaccctgtatcaacacacacacacacacacacacacacacacaaacaaacaaacaaaaaacaatgattagcctgcctaagagggagtcttgggcgggtcacttcacctccaatggagcgtctgggcatgtggctgtgatgtaaggctggcagctacccctgtgtctgggttgcaaccttgggtcccatggggatgttgctggagtggcctctggcctaactttgggccaccctgagcagtcagtggcaagccagggaggggtgactctccatggctcagggatctgattctggggcatcactggccctgactctcccctatccccaccagctcccaggcagcagttctatagccctgtcccctcccctctgtcctccctcagcccaggggacatcgggtcttgaaacagaaacagcagggccccagggagtgtcctcttcccatccaggcctctgggctcctgctgacgtgagctgagtcccttggggctggtggatgtgccaggatgtgctagctgggcacctgcttgggaacagagtctcaccatcctaaactgcagcttaaatcctaggccggggagttggaggtgtgtagctatgttcctctcgccttctctggagctgaaaaaaaatccaccttaggagacaggacacagttctcagacaatgaagccaccaaccccttgtctccttatgccatgggaatgttaacaggacttatatgttgccaggcgcagtagctcacacctgtaatcccagcactttgggaggccgaggcaggtggatcacctgagatcgggagttcaagaccagcctgaccaacatggagaaaccccgtctctactaaaaatacaaaattagccgggcatggtgatacatgcctgtaatcccagctactcgggaggctgaggcaagagaatctcttgaacctgagaggcggaggttgcagtgagccgagatggcgccactgcactacagcctaggcaataagagcgaaactccgtctcaaaaaaacaacaaaaaccaggacctatatgttaacttatagagtgggttggagccctctgtcggttaatgtgtataaagcactttcataatgccaggcacacagcaagcattcaataaatgtcttgttattattactgtatgcctgaaaggatctaacctggcacccaggacacagcaggtgctcaacaaatggacactattggctgggtgcagtggctcacgcctgtaatcccagcacactgggaggctgaggcgggtggatcacctgaggtcaggagttcgagactggcctggccaacatggtgaaacccgtctctactaaaaatacaaaaattagccaggtgtagtggcgcacacctgtagtcccagctactcgagagactgagtcaggagaattgcttgagcccggcagcagaggttgcagtgagctgagatcacatcactacactccagcctgggtgacagagtgagactccatctcaaaaataaataaataaataaataaatggacattatcatcaaaggtccaagctgatgatctatgattatctcaccttaagaaccttaagagtggctttttttgtttgtttgttttttgagactatcccctaggctgcagtgcagtggctcgatcttggctcactgcaatctccacctcccaggatcaagtgattctcctgcctcagcctcctgagtagctgagatcacaggcgcacaccagcacgccaagctaatttttgtatttttagtagagacggggtttcaccatgttggtcaggctggtctcgaactcctgatctcatgatctgcccgccttggcctcccaaagtgttgggattacaggcgtaagccaccgtgcccggcctttttcttttttttttgagatagggtctcactgtatcacccagtctggagtgcagtggcatgatcacagctcactgcagcctccaaatcctggtctcaagcaatcatcttgcatcagcctcttgagtagctgggactatacacatgcaccaccatgctcagctaacttaaattttttgtagagacagggtcttgctatgttgcccaggctggtctcaaactcctggacttaagtgatcctcccacctcagcttctcaaagtgctgtgattataggaatgagccattctgcttggcccattttatccattttcgagtgtatagttcagtggcattaagtacattcacattgttgtgcaaccatcaccaccatccatctccaggactgtttttttttttttttgagacagggtctcactctatcacccaggctggagtgcagtggcatcatcactgctcactgcagtctatacctccagggctcaggtgatcctcccacctcagcctcctgagtagctgggaccacaggcgcacaccatcatcatgccttgctaatttttttcattttttgtagagatagggccttgccatgtttcccaggctggtgttgaactcctgggctcaagcaatcctcccgcgtgggcctcccaaagtgctgggattacagatgtgagccacttcacccagcctccaagactttttttttttttttgagacggagtctcgctctgtcgccaggctggagtgcagtggcgcaatctcggctcactgcaaccttcgcctcccgggttcaagcgattctcgtgcctcagcctcctgagtagcttggattacaggcacgcaccaccacacccagctaatttttgtatttttattagagacggggtttcatcatgttggccgggatggtctcgctctcctgaccttgtgatccgcccgcctccgcctgccaaagtgctgggattacaggcgtgagccaccacacctggccaggactttttaatgttctcagactgaaactttaagcacaaacacaccatttccctatctcccccagccgctggcacccactcttctactttctgtctctgagtttgagtactccagggacctcatataagtggaatttcctgtgcactatttgtctttttctgactggcttattttactgagcataatgtttttttgtttgtttgtttgtttttgagacagagtttcactcttattgcccaagctggaatgcaatgtcccaatctcggctcactgcaacctccacctcccaggttcaagtgattctcctgcctcagcctccgagtagctgggattacaggcatgtgccaccacgcccggctaattttgtatttttagtagagacagggtttctccatgttggtcaggctggtctcgaactcccaacctcaggtgatccgcccacctcatcctaccaaagtgctgggtcactgagcataatgttttcagggttcatccatgttgtagcctgtgtcagaattcctttcctttttaaggctgaattctattccattcaatggatataacacattttgttgatccattcatctgttgatggacacgtcagtcacttctaccttttggccatcgtgaattacgctgctgtgaacatgggtgtacatgtatctgtttgagatccccactttcaattcttttggggatagacctaggagtgggattgcgcggttgtgtggtgattctacgtgtttgtttgttttgagggttttttgtttgtttgtttggttggtttctgacagagtctcattctgtcggccaggctggagtacagtggtgtgatctcggttcactgcaacctccgtctcccgggttcaagcaattatctggctgcagcctcccgagtagctgggactacaggtgcctgccaccacgcccacctgatttttgtatttttagtagagattgggtttcaccgtgttggccaggctggtctcgaactctggacctcaggtaatctgcccgcctcggcctcccaaaatgctgggattacaggcgtgagccaccgcacctggcctacaaacatttttgattggggttacagtggttctctcaacagcaggtaggaatggattgtttgtgagtggggaggaatcggagcagcagagagacctggttggaatggagagtgcagcaggtgagagaggaggtgttgtgacctcagggatgcgaagagtccaggccttcaataaggtctgtctctggaactcaaatctgaggcccaggaggcgggtcagaggctgagagacggggtggatggaggtaggagtgcctcctggctccacagtcccttctcttggagtgaagagaccagctgtctggaggggagagcaactgggaaacaggacacgggtaaaggccagttacaagtggcatcctggagagaaggtggctcaggacacagctgtccccaaaataccctccttggcattgcatgcaggggatggaggaaccctaagatcttcaaaagtaaaaggcccttcaggaaccatcctaataggcgtgacatggtatctccttttttttttttttttttttgagacggagtcttgctttgtcacccaggctggagtgcagtggcgtgatcttggttcactgcagcctctgccacccgggttcaagcaattctcctgcctcagcctcccaagtacctgggattataggcacccaccaccacacctagctaatttttgtatttctagtagagacagggtttcggtatgttggccaggctggtctcaaactcctgacctcaagtgattcacccaccttgcctcccaaagcgctgggattacaggcatgagccacctcaccagacctgtatctctttcttttgatttgcgtttccctgatgagtgatgttaaggattttttttcatatgtttattggctgttttaatatcttttctgcagatatgcctattcaagtcatttgcctattaagtcaaattatttacaatttattatttattattttgagacagggtctcactctgttgcccaggctggtgtgcagtggcacgatgtcagctcactgcaatctctgcctcccgggtttaagtgattctcccacctcagtctctctagtagctgggattacaggtgagagccgccatgcctggctaattattttatttatttatgtattttttgagacagagtctcgctctgtcatccaggctgaagtgcaatgtcgcgatctcagctcactgcaacctccaccttccgggttcaagcagttctcgtgttttagcctccccagtagctgggattacaggcacatggcaccacgcccggctaatttttgtatgtttagtagagacagggttttcactgtgttagccaggatgggctcgatctcctgacctcgtgatccacccacctcggcctcccaaagtgctgggattacaggcgtgagccaccacgcccagccaattttttttttttttttttggttgagacggggtttcaccatgctgccctggctggtttcaaactcctagactcaagtgatccgcccacctcggcctcccaaagtgctgggattactggtctgagccaccaggcctggcctatttatttttgaaacaaagtctccctctgtcgtccaggctggagtgcagtggtgcgatcacagctcactcactacagcctcaaacatcccaggctcaagtgatcctccagtcttagcctcccagtagctgggactgcaggcacacactgccatgcctggctaattaaacaagttttgtttttttgtgttttttgtttctttgtttctttgtttttgagtagctgggactataggtgcacaccaccatgcccggctaatttttgtatttttagtagagacggtttcgccatgttgtctgggctggtctcgaactcctgacctcaagtgatctgcccgcctaggcctcccagagtgctgggattacaggcgtgagccaccgtgcccagccctttttttttttaagagatggggtctcactatattgcccaggctggccacaagctcctggtctcaagccatccttccacctcagcctctgttgatacacaaaagtctttcattttgttgaagtccacttgtttgttattgttgttgcctgtgctttggtgtcaaattcaagaaatcattgccagatctaatgtcatgaagctgctaagagttttatagttttggctcttatgtttaggtatttggtcattttgagttatttttttttttttttttttttttgagatggagtctcgctctgtcatccaggctggagtgcagtagtgtgatctcggctcactgcaacctccgcctcctgggttcaagggattcttctgcctcagcctccggaatagctgggattacaggcacccaccactacgcccggctaatttttgaatttttagtagagacggggtttcaccatgttggccaggctggtctcgaactcccgacctcaggtgatctgcccgcttcaggcctcccaaagtgctgggattacaggcatgagccaccacgccctgccttgagttaatttctgtatgtggtccacctcttcagttttcccagcaccatcgttttgaaaagacagttctttccccattgagtagtctctggggttagactagtaggtagatttcaggctatgctctgagtgggtgcaagtggagagggagagaggataggaaccccccgcttcccctttctaggtcagcctatagagagtcaccataagactttactggaatggtctctctactaagaaataagtttgaaatctcctaggcctgccaggcacctataatcccagcactttgggaggctgaggtgggcagatcacttgaggccaggtgtttgaaaccagcctggccaacgtggtgaaaccctgactgtactaaaaattcaaaaattagccagatgtgctggtgcatgcctgtaatcccagctatccgggaggctgaggcaggagaattgcttgaacccgggaggcagaggttgcagtgaaccgagatcgcgccactgcactccagactgggcgacagagtgaaatcctgtctcaaaaacaaaacaaagcaaaacaaaaatgtataagaagacacgctttaggcatagcgtttcatgtctgtaatcccagcactgtgggaggccaaagcgggaggatctcttgagcccaggagttacagactatcctgggcaacatattactattactattattaccttattattataattacttattacatattaccttattactattattacatattaccttattactattattacatattaccatattactattatcacatactactaatatatgtaatattactaatattacatatataatatcagtaatattatatatagtaatattatatacatgcatgtaatattagtaatagtgcatatacatgtatgcaatattagcaatattgcatatgcatatataatactagcaatattgcatatgcatgtgtatgtaatattagtaatattacatattacatattaccaatattacatattacctattactacaaaaaattcaaaaattatctgggtgtggtggcacgtgcctatagtcccagccactcccgaggcttaggtggggggatcgctagagtccaggaggctgcagtgagctatgatggttccactgcactccagcctgggcaacagagtgagaccccatcactaaatgataagctgcaaacttggagaaaaatacatgataagggatttgtatccagaatatataatgggccagccatggtggctcacgcctgtaatcccagtgttttgggagcccaaggcaggtggatcacttgaggccaaggtgagggcattgcttgagcccaggtgttccagaccaacctggacaacatggcgagaccccatctctacaaaaaatacaaaatttatctgggggtggtggcatgtgcctgtagacccagctgcttgggaggctgaggtgggaggatttcttaagccagggaggtggaggttgcattgagctgagattgtgccattgcacttcagtctgggtaagagagtgagaccctgtctcaaaaaaaaaaaaaaaaaaaattagctgagcttgctggcgtacacctgtagtcccacctacttgggaggtggaggtggaggatagcttgagcccaggaagttgaggctgcagtgagctgggattgccctacaggactccagcctgggcgatagagcgagatttcatctcaaaaaaacaccaggccaggcgcagtggctcatgcctgtaatcccagcactttgggaggccgaggtgggtggattacttgaggtctggagttcgaaaccagcctggccaacatggtaaaatcccatctctactaaaaatacaaaaattagccaggtgtggtggcaggtgcctgtaatcccagctactcgggaggctgaggcaggagaattgattgagcccaggaggcagaggttgcaatgagccaagatcgcatcactggactccagtctaggtgacagagcaagactgtctcaaaaaaaaaaaaaaaagataaatatagattatgtcaagtaagtagtgggattttagtttgtgtgtgtgtgttttaaggaagagaaatagtattgggctgggcacggtggctcacgcctgtaatcacagcactttgggaggtagaggtgggcagatcacctgaggctgggagtttgagaccagcctgaccaacatggagaaaccccatctctactaaaaatacaaaatgggctgggcatggtggcccacacctgtaatcccagcactttgggagcctgaggcaggtggatcacctgaggttggaagttccagaccagcctgactgtgtctactgaaaatacaaaatttgccaggcgtggtggtgcatgcctgtaatcccagctactcgggagactaaggcaggaaaatcgcttgaacccaggaggcggaggttgcggtgagctgagatcgcgccattgcattccagcctgggcaacaagagtgaaactccatctcaaaaaaaaaaaaaaagtattatggttgaaattttagctgggttggtcaggggaggcttctttgtggcagtgacatttgagcagaggcctgaaggagggaaagaggagccgctgcaaatctgggctggagaaacagcctgtgcaaaggccctgaggcaggactgtgtctgagattttttttttttttttttgagatggagtcttgctctgttgcccagactggagcgcagtggcaagatcttggccctcactgcaacctccgtttcctgggttcaagtgattctcctgcctcagcctcccaagtagctgggattacaggcatccaccaccacgcctggctaatttttgtatttttattagagatggggttttgccatgttggccaggctggtagagaactcctgaccttcagtgatctgcccaccttggcctcccaaagtgctgggattacaggcatgagccacctcaccccggcctgtgtctgagatttttagggaacagtgaggaggccattgtggctggagcagaatgagtgaggggggaagggaaagtcgtgggacaggacctgtgagctgcagtgaggactttggattttgcccagagtaaggtgggatccatcgaaggttctgagcagagggaggacttgacctcattcaggtgtttccaagctcgccctggtggccactgaagaaagactgggggttgaaaacaggaggtgggtactagggcagaggtgaatgcaaccagtcctggctgagggaagctgaccaaggagtgggtgagaagtagacagattctggatagattttggcaccaaggctgatttgaggtacgaaggaaagagtgaatgatcccataaattttggccttggggtgtccccagcacagcagtggggatggatgcacaccggtgctcaagttccatctttgcaattctgtgtctcccgtctcttttagggcatctgtctttctttaacatcctccacttggttgggcgcagtggctcaggcctgtaatcccagcactttgggaggccaaagagggaggatcacatgaggccaggtgtttgagaccagcctggccaacatggtggaaccccatctctactaaaaatacaaaaattagccaggtgcggtggtgcatgtctgtaatcccagctacgcaggaggctgaggcagaaaaatcacttgaatccgggaggtggaggttgcagtgagccaagatcacaccactgcactactccagcctgggccacagagcgagaccatacctcaaaaaaaaaaaaaaaaaattctccacctgaatgtctgccaggaattcccttaggctcctcatcccacccccacctttttttttttgagacattgtcttgctctgtcacccaggctggagtgcagtggcacgatcttggctcactgcaacctccgcttcctgggttcaagtgattctcatgcctcagcctcccgaatagctgggattacagacacctgccaccatgcccggctaatttttgtatttttagtggagacagggtttcatcatgttggccaggctggtctcgaactcctgacctcaagtgattcacccccacttggcctcccaaagtgctgggattacaggcattacaggcgtgagccaccgcacccggcctcctcattcctcttgacctccctaatagcgtttcagcctcctgacccctcttctcgcccatcccctgcagcttcgaggcagagaatgggccgacaccatctcctggccgcagccccctggactcgcaggcgagcccaggactcgtgctgcacgccggggcggccaccagccagcgccgggagtccttcctgtaccgctcagacagcgactatgacatgtcacccaagaccatgtcccggaactcatcggtcaccagcgaggcgtgagcatccttctccccacatgccagttcccccaggcctggtcctgctggaagctgcccttcccagcagggagtcggggggcacccacccctatcctcctcagcactcccaacctgtcctccccagtgaagggtaagcagcaccctgcccctcctataaagggctcagttcctttttttttttttttctttttttcttttttgagacggagtctcgctctgtcgtccaggctggagtgtagaggtgccatctcagctcactgcaacctccgcctcctgggttcaagcaattctcctgcctcagcctcccgagtagctgggactacaggcaccagccatcatgcctggctaattgtgtatttttagtagagacagggtttcaccatgttggccaggctggtctcaaactcctgacctcaggtgatccgcctgccttggcctcccagagtgctgggattacaggcgtgagccaccgcgcctggcctcagttccttttttttttgagacggagtgtctctctgttgtgttgcccaggctggagtgcagtggtgcgatcgcggctcactgcaagctcctcctcccaggttcacgccattctcctacctcagcttcccgagtagttgggactacaggcacccgccaccatgcctggctaatttttttgcattttttagtggagacggggtttcaccgtgttagccaggatggtctcgatctcctgacctcatgatctgcccacctcagcctcccagattgctgggattacaggcatgagccaccgcgcctggcctcagttcctttttttctcttttttttttttttttttttttttttgagacagaatctcacactgtcgcccaggctggagtgcaatggtgcaatctcggctcactgcaagctccacctcccgggttcatgccattctcctgcctcagcctcctgagtagctgggactacaggtgcctgccaccacacccggctaattttttctatttttagtagagacggggtttcaccttgttagccaggatggtctcgatctcctgacctcatgatccgcctacctcggcctcccaaagtgctgggattacaggtgtgagccaccgcgcccggccctcagttccttttttaaaaaatataatagtgatcgggtctcactatgttgcctagactggtctcaaactcctgggctcaagcgatcctcccacctcagcctcccaaagtgctgggattgcaggcatgagccaccctgcccgccctcagttactttatagcatgtccagccagaaaggtgtgagtgcccacccactgtatcctcccacagtgtgtacatctcacctgacccaccctctgcccttcctccaggttttcctaagctaacctcccttatcgtgacacttgttgaggtgtgagttccccctgaacctgctcagcctcttcctctctcactgggttcctccaggcctttccaccagccattgctgtacacacctcaacccacttggtccccttcctgttcactgctcccctcatcaagccccgcccttgcaacatattcacctcgggtcaggcttggaagctcacactcataatcctagcacatttggaggctgaggcagaaggattgcttgagctcaggattctgagaccagcctggccaacatagcaagacttcatctcttttttatctctctcttttttttttttttgagatggaatcttgctctgtcaccaggctggagtgcagtggcgcgatcttggctcactgcaacctctgcctcccgggttcaagggattctcctgcctcagcctcccaagtagctgagactacaggcgtgcgtcaccacacccagctaatttttgtatttttagtagagacaaggtttcaccatgctggccaggataagatgtcatctctttaaaagaaaaaataaataaataaaaaggtcaggcacggtggctcacgcctataatcccagcactttgagaggccaaagtgggtagattgttccaggccaggagtttgagaccatcctggccaacatgatgaaacccagtctctactaaaaatacaaaaattagtggggcgagaggcacatgcctgtaatcccagcttcttgggaggctgagacaggagaatcgcttgaacctgggaggcggaggttgcagtgagctgagatcatgccaccacactccagcctgggtgacagagtgagactctgtctaaaaaaaaaaaaaacacccaaccatattcacctctcccctctccccttttccactttgtctcttctccccggacctacctgagccacactccttgactgccatttcttccacgatcagccctggacacatatccacccttatgcagtacaagtgttctttccctaggtcccacagagtcccctccctccctctcagcctccctgggtccagcctcacagggcatctaccccagacagttgcttctctgcggacccctgacctgcctctgtcctcaatcacaggcacgctgaagacctcatcgtaacaccatttgctcaggtgagacctcttcccaaatggttaaggagagaaggggctccaatgctccgccacacttggggacagggcccagccccgctgcctctctaggggaaccccactcctcactgccgctccccatcccaggtgctggccagcctccggagcgtccgtagcaacttctcactcctgaccaatgtgcccgttcccagtaacaagtaagtgaaggctgggctgcaacagctgtgatcataaggtgaagcatatgcgggttctgctctcagccctgctgtgtgacctctggcaggcaggtgacctctctgaacctctgttcagacaacagctcccagaaagccagagagccattgcaggtcaagtgcctaagacacagaggtgttttttgtttgtttgtttgttttttgttttttgtttgtttgtttgttttgagatcaagtctcactctgtcacacaggctggagtgcagtagtgcgatcttggctcactgcaacctctgcctcccgggttcaagcaattctcctgcctcagcctcccgggtagctgggattacaggcatgcaccaccacaccgggctaatttttgtatttttagtagagatggggtttcaccatgttggccaggctggtctcaaactcctgacctttggtgatccacccgcctcagcctcccaaagtgctaggattacaggtgtgagcctctgcgcccggcccagaggtttttataaataaagatttaggggtctggatgcatggtggtgaggccacagccacagtccccaggcccaccctgggtcttgacaccaagttgctgggcaaatggcattccatggtgcttctgttgcccttctgcaaagtgatgatcacagccaagcgtgctggctcatgcctgtaatccagcactttgggaggccaaggcaggaggtcacttgaattcaggagttcaggaccagcccaggggaaacaaaatgagaccctgtctctaaaaaaaaaaaaaattagcccagcatggtggcatgtgtctgtggttcccacctacacagaaggctaaggcaggaggatagttttgagcccaggaggttgaggctgcagtgagctgtgttcccaccactgcactccagcctgggtgacagagcaagaccctggttcaaaaaataaatagataaataaagtgaggattacaataatgcctcccttagataactgctgtgaggagaggagatgatgtctagaaagtgctagaatattgccctgcgtacataggagtggatcttaattgtttcagtgcaagagatgtggctgagagctgccagtccttctgggggtgggggatagagacatccttaggggcttggaggatttgtggagagttaggcaagagagcagagatcttggaagcccaggacctgaccttaaggcggatcagccatgtggtcttgaagaagctgtttcacctccttgagcctcagtttccacatctataaaatggatttttctgggactcattgaggctgcaggcagagtacatggcagcgtccttaggacacggtgagttttcagacaaatgaaaattggcactgttcatgaaagcgggaggcagggacctggtggggggacccaggctgacattgcagccccatttttttttttctgcaggcggtccccgctgggcggccccacccctgtctgcaaggccacgctgtcaggtagctaagcccagaggggtgggaaggggccccccttgctgccccagtgggggtccctcagccccttccccacccagcagtccactcacctggcgaaccccgtcacggcggtctggagcctctgggcttctgcctacagaccttctcagtcactaccctggctgccccttccttagaagaaacgtgtcagcagttggcccgggagactctggaggagctggactggtgtctggagcagctggagaccatgcagacctatcgctctgtcagcgagatggcctcgcacaaggtgtgcaggtggtgggcagaacccctgggcggggcaggcgggggcggggccagtgggtagagccaaccgctggatgggaccagtgggcgcggcctgcggatggagccagccattaggttgttcctgtgggcggagatagctactgggtgtggctgattagggcagggccaatccctgggcgggggctggtggagctgggccctatggatggagccaaccactaggttaggcctgtagccgaggccaactattgggcgtggctcatgagggtggggccaatctctgggtagggtctatggtatggggtcagtccctgggtggggccaacccctgggcggcagcttcaaggcttgaagctcctgtagattatgactttccccagggctggaggagcctggtgtgtgttgtggggtggggtgtgtctgtctggttgtacatgtgtcaataggtgaccgtttccgttggggggttttatgcttttatggtctgcgggggtgtatctgcggctataggtctgcgtagccgctggtttattggctacgcatttgcagcgctggggtgttgggaatagattctgaagagtggcacgccagtgtgtacttgtgtaggtgtataggtttgcacgggtaattatgcagggttataggtgtgtggggctgtgccagaggggtgcgcatgtctgcaggggagagttggaccagatgggaaactgaatgtgtagctctatgtgtttgtgaatgtgtgtgtttgcagggccgtaggggtgactgcaatgctcccatgtacagttgtgcagacggtgcactgcacaactccaggggacaccattcaggaagcaggcagtatgtgtgaatgatgcttcctggagttggagagagtggtaacagcccttgtgggcgggtgcctatcaagaaatgatctgtaggtgggagtgtctttgttggggggtgcttacagcagtgggtggaggcttgtataggaacatagcagtctgagggcgattgtgtccctgagggtggatcaagcatctgaaatgtagctgtgtctttggatatgggtctgaggatgtttctgcaatggtgtgtgtgtgtgtgtgtgtgtgtgtgtgtgtgtgtgtgtgtatttttgcatctgtgagtatatttccttatggatttgtcgggatatgtttgtgtccaagggcagtggatatttgcaatggttggaaagtgtgtctgtgggtgtgtttagtgtgtgtctgtaagtgtggctggctggggaggccaaggcgggcggatcacctgaggtcgggagttcgagcagcctgaccagcatggagaaaccccgtctctactaaacatacaaaattagtcgggtgtgctggagggtgcctgtaatcccaactactctggaggctgaggcgggagaattgcttgaacctggaaggcggaggttgtggtgagccgagatcgtgccattgcactccagcctgggcgacaagagtgaaaactccgtctcaaaaaaaaaaaaagaaatgtggctggtatctcggtgtctgtctataggtgtgggtctggatgtgggtctggatgtgggtctgtgcccttggatggggcgtgtctgaaggcatttgctatatgctcagctgtggacctataagtgtgttggacatcagagttgtgactgtctccgggtgtgtgtgtgtgtgtgtgtgctgtaagtgtacaacagaaagcatttgagtatctgtgtatattcaagtgtcaagtgcctggatgtgtgtgggtgtccctggaaggtgtgtctcagggtgtttgtacatctgtgagtgtaaagtggatgtgtgtttctgtctctgggtgtgtccatggaggggatgggtcctgatggggacagcccacctaggttctggctgaggcccatgggctctgatgcccctttaatacccccccacccccagcaccacctgacatcccatgcagcctgccagtgctgcagtgagcacacacgcacacacacgggtgcacacacagagctccgcagcctcctcctgggacccttgccctgcccccctcccatgggcacggaccccccaccgcctccacccactgccgcgggggggcccgttggggcccagggctggcgggccatgtaaccagggctgctgctgggagcgcggaggggaagggagcccccagccctgctgggccggcccaggcccctccgcggctcccccttccactacccacctgcccggcaccccctccccagtggttgttaaccccgggactccccaagcccagcctctgtgtgcagcagccccaggcgggctaagtctccaagatgcccttggtggatttcttctgcgagacctgctctaagccttggctggtgggctggtgggaccaggtaggagagtgcagggtagggggtgggcgggcatcctggtgagctgggcccccggtgtgggcttgtgtgtgcagctgtgcacgtgtgtggcctggagatgaagccttgtgactgtctctgtgtgtggcccagggctgggcgtggatggcgggcagctgggggtgtgtgactctccctgggggtggactgcgggtccctcactgggtgtgactgtgtcagtgcctggatgtgtgtgtgtgtgtctgcgatggtgtgtgtctgcctgagtataggcttgtttgcctgggtcactgtgtggccctgtctgagatcatctggctctgaccatggtgttgtgtgttgggttgtgtgtctgagcccagagctgcctgatattttggggacatgtgaccccaaatgtcagtgaccgccttattttgcatgccctttgatctgtgtgtctgggctgtgtgacgctgtgtaggactgagagcctgtgattgtgtgtgtggttgtgtgagattttgtgggtccatcttgtgtggatgtgtgtgtctctgtacccagggtctctgggtggcaccgggaggagggagcaccccgtccaagcctgggccatgcaggctcacccctcctgccaagtgtccctcctgcttccctggacagagtctgctcctgcttttggggtgctgtggcagagcttgggggtggggagccaatgccctttctcctctgtgtacaatgtcacagcagaggcctgtgcagagtggcatggggggaccaggaggggcctccaagcccggttttgggtatactctgttcatctgtgcatctgtccacccttctggggttgggggagagtgggctatgatgagaacccccctccccctcccctgggtgatcaaactgggatttcctcagctcaccattctcccctaccccggccaaacctttttgtcccccagagcttggctaccacgttccctttttccaaactgagctggaggccaggagccaggacccccaggattggggtccatgtctgggaacacttgggtcaggggcagctctaggaaggcaagggttaaggggcctccggcttgccccccttttccccagctcagcagctggttggagggggagttgctaaggagactcccatcgccatggcgacgggattctcctgcttccctattggctccctgttaggcaggagcccctcccttccacaggtgcccctctagctcctccttgggggagatgaggagggaagcccctctttcctcaggcagggagggttatgctgaccatgactccccaaacctggggacctccatccagagctgggaggacaggaaaggctgaccccaaccccccagcagtcttataggggctctgttggctgagcagaaaaataggagggactcatggggtcttcaggcgttcttgggaaggactgacaccctcctcaccactgtgcttcccccatcatttcttccttgttgactcctttaccttagttcaaaaggatgttgaaccgtgagctcacacacctgtcagaaatgagcaggtccggaaaccaggtctcagagtacatttccacaacattcctgggtgagtgaggggaagcacgtgggattggaggggggacatttggggtagagagggggctgcccctgaccgtgggtcctgttgctcacatcttcccagggactctgactctcaactccccaaaggtcacagtcaccctatccaggaaccctcatgttcctgatgcctccaaactctgtgggacccccagcttctatagagcccaacatctgaaatcatctgtgagcttaaaacccttctaaactttaaaaagcctccaagcgccgggcgcggtggctcacgcctgtaatcccaacactttgggaggctgaggcaggcggatcacttgacatcagcagtttgagacctgcctggccaacatggtgaaaccccatctctactaaaaatacaaaaaattagccaggcatggtggtgggtgcctgtaatcccagcaactcaggaggctcaggcaggagaatcgcttgaacccagggggtggaggttgcagtgagccgagatcgctccattgcactccagcctaggcaacaagagtgaaactcttgtctcaaaaaaaaaaaaaaaaatattagccgggcatggtggtgtgtgcttgtaatctcagctacttgggaggctgaggcaagagaatctcttgaactcaggagacagaggttgcagtgagccaagatcacaccactgcgttccagcctgggcaatagagtgagactccgtctcaaaacaaacaaacaaacaaacacctctttgttttagcactcacttgaacccgggaggcagaggttgcagtgagctgagatcacgccactgctgcactccagcctgggcaacagagtgagactctgtctcaaaaaataaacaaaaaaaaaaagcctccaagctgaaaagcctcctgaactgagtagaaccccaaattcaatagaatttccaaacttggattgactcccttccaaactcagtagacacacccaaactcaagagagatgcccaaactcagtagagttctcaaacttaagggaagttctgtgcttccgagtccacaaaaggccccccaactttagcaacctccaaactgaaaaacccccaaattcaataggatctccaaacttggtatgacccccccccaattcagtagactcccaaaatgttagaaccctaatctctagaagattatcaagcttaagaacctgtaagaggcaggaagaggcagctcttgcctataatcccaggactttgggaggctgagaaaagaggatcgcttgagcccaggagttcaagaccagcctgggcaacatagtgagaatctgtctctacaaaaaaaattaaaaactaggccgggcgcagtggctcacgcctgtaatcccagcattttggaaggccgaggtgggcagatcatgaggtcaggagttcaagaccagcctgaccaacatggtgaaacgccatctctactaaaaatacaaaaattagctgcgcgtgttggcacacacctgtaatctcagctactcaggaggctgaggcaggagaattgcttcaacctgggagatggaggttgcagtgagctgagatagcgtcactgcactccagcctgggtgacagagtgagactccatctcaaaaaaaaaataaataaataaataaataaatagaataaaaaactagtcgggcatggtggcgtgtgcctgtggtcccagctacctgggaggctgaggcaggaggatcacttgagcccaggagttcgaggctgcagtgagacatgattgcgccactgcactccagcttgtctcaaaaaaactaacacctgtaagattcctaattcaatggaaccccaaatgcaccagaataccccgatttcactggaacccttaagttcatgggtacctcaaaaccctcaagctagagatattcccccaaactcaggataatttaatcctcgcagtttatcactacactccaaaggcccccaaattcgggaaccgcccagacaagctcaagaaaagtgttggggctgggtgcggtggctcacgcctgtaatcccagcactttgggaggccgaggcaggcggatcacttgaggtcaggagttcaagaccagcctggccaacatgatgaaactccatctctactaaaaatgtaaaaattagccgggcgcggtggcgggtgcctgtaatctcagctactcgggaggctgaggtaggaaaatcgcttgaacccgggaggtggaggctacagtgagccagagatcgtgccactgcactccagcctgggcgacagagcgagactctgtctcaagaaaaaaagtgttcggtgtttccagtactcccaccagtgagggtgtgtctctgagttctgaggatccacccaatgggagcataacatgtaaatgacccgtattaggccttttcattgactagctagctccaggtcacaatgggtgaccttggctcagctctggaagcccctgaaagctcaggaaaagggttcctggggctgtcccccaggcaggctggtgccaaggtgggcgggggggggggggggcagggacatggagccagagaccacccttccctctctcttcccagtgatgccaccccccacaccagcactcttggcccccatgctgggatcttccccacccagaaaggttccctgggtgttcggggtaggcagcggctctccctggcatccccacctcgctttctgacttcccacaccactctccatccatatctgatgatcagaccggggccatcccagagccctgggcccccactccagcccaccacctcctggaagatttcccacatcccctctggtttcctgactctgagtagccagcggcatcacagctgaaagggttctgccgtttcgggtgagccttccccgtacgtggtagtgggctgaagaataagggagcctccaggggtggaagggttgttcacacttgttcctgctccccatcttctgcagacaaacagaatgaagtggagatcccatcacccacgatgaaggaacgagaaaaacagcaagcgccgcgaccaagaccctcccagccgcccccgccccctgtaccacacttacagcccatgtcccaaatcacagggttgaaaaagttgatgcatagtaacagcctgaacaactctaacattccccgatttggggtgaagaccgatcaagaagagctcctggcccaagtgggtgggggctcagtaggggcagggctggagggggtggtctcctgggaccctgagaaggactgggcattgggttatgtcttaggccaggtttcccagaagcagagcttgagatgagggtttgagcccatcttgaggcaagcatgctggctctttgtacctctgtatcattcattgcttgggggccgtccccagggctggacgtatcacctcttgcatgtagctcctgttgggactagtcttctggaaatgcaggcagctgtgagccttagcaggcaacactcccagctgcagagggattggtgtacacagcagtgacgctaatccagactgtgcccccatagtgtccccaacagtccagaccggtgtttcactcctagctcttccaggggacagcggcagtggaagtgatccatctttggtggctcactcagctgaggcttattgtaaccctctttgagccacctcctccagtgaatcttccattcagtcacctggcctttagttatttatttttatttatttatttattttgagatggagactcgctctgttgcccaggttggagtgcagtagtgtgatctcggctcaaggcaacctccacctcctgggttcaagcaatactcctgcctcaccctcctgactagccgggactaaaggcctgtgccagcacacctggctaatttttgtatttttagtagaaatggggtttcaccatgttgaccaggctggtctcgaactcctggcctcaagtgatccacccgccttagcctcacaaagtgctgggattgcaggcgtgagccactgcacctggccaactggtgtttattaagcagctactatgtgctggcccttttctgaattttggagagacatggaaaataagcccttcttcctttctcccctggggctcgtgaacagcttagctaagaggctgagctgtgctggggccagtcgtgctgggttcctatcctagctttgccacttatgagctgcatgatcttggagaagtcacatcgcctctctgagccttggtgccttcacctgccaaacgagatcaagtgcttagagcaatacttggcagatcataagtactcaaaagacagtggctgtgattgctttcgctattttgcagcccagtaggacgagggcagtacattctgtgctgttgaacctgtcacccactgggtgagcaataatggtgcttccttcagaccaaggcttcaaactcctaggaaatgttctccagggccctgagccttacaggcttctgacctctggcctccgtctccaccaggaactggagaacctgaacaagtggggcctgaacatcttttgcgtgtcggattacgctggaggccgctcactcacctgcatcatgtacatgatattccaggtgatggggacagctgggagtgggcccgggtgaggggctcatagcggggcgctggaggccggtggaggtcaccaccctgcccctgcctgctctcaggagcgggacctgctgaagaaattccgcatccctgtggacacgatggtgacatacatgctgacgctggaggatcactaccacgctgacgtggcctaccataacagcctgcacgcagctgacgtgctgcagtccacccacgtactgctggccacgcctgcactagatgtgagtgactgccctgtgagtgaccgtccccatctctctttgtgactgcctcttcagcctcctgtgtgtctctctgaccctgtgtctctgacctccatctctctttgacgccatttctctctcttttttttttctttttgagacggagtcttgctctgccacccaggctagagtgcagtggcacgatctcagctcactgcaacctctgcctcccgggttcaagtgattctcctgcctcagcctcctgagtagctgggactacaggtgcccaccaccacgcctggctaagtttttataatatttttagtagagatggcgtttcgccaagttggacaggctggtctcaaactcccaacctcgtgatcagcccgccttggcctcccaaagtgctgggagtagaggcgtgagccactgtgcccggtcaaaaatcttatttcttaaaaaaaaaaaagttttagtccaggtgcggtggctcacacctgtaatcccagcactttggaaggccaagatgggtggatcacctgaggtcgggagtttgagaccagcctgaccaacgtggtgaaacactgtctttactaaaaatacaaaaattagccgggcgtggtggggcacgcctgtaatcccagctactccagaggctgaggcaggagaatcgctggaacccagtaggtggaggttgcagtgagccaggattgcgccactgcactccagcctgggcaacaaagtgagacttcatctcaaaaaaaataaaataaaaattgcggggggctaggcacggtggctcacacttgtaatcccagtactttgggaggctgaggcaggtgaatcacctgaggtcagaaatggccaacatggcgaaaccctgtctctaccaaaaatattttaaaaattagccgggcgtggtggtgggagcctgtaatcccagctactagagaggctgaaccaggagagttgcttgaacccaggatggggaagttgcagtgagccaagatcgtgccactgcattccaacctgggcaacaagagcagaactctgtctcaaaaaaaaaaaaaaaaaagaaagaaaattaaatttgagacagggccttgctatgttgcccaggatggcctcgaacttctggccttgaagtcctaggctcaagtgatcctcccatctcagcctcctaagtaggtgagacaaacaggtgctcaccaccatgcatggcttcaactctgttattctaacatccgtgtctctgctcccaggcagtgttcacggacctggagattctcgccgccctcttcgcggctgccatccacgatgtggatcaccctggggtctccaaccagttcctcatcaacaccagtgagtggccctcgccaggggcggggtttgctgagttggaggcggtgttggccaggctgggggcggaactaactaggctggaggaggggctggctggcctgggggcggggctggctggcctggaaaggggatggccgggcaggaggcggggctgggggcggggctggctgggctggaaaggggatggccgggcaggaggcggggctggctgggctggaaaggggatgaacgggcaggaggcggggctgggggcggggctggctgggctggaaaggggatggccgggctggggtagagctgactgggctggaggcgaggctggccgggctggggaggggttagctagttgggggcggagctggccctcctgcggttggagctgcacacgtgggccctcccctgacctccgggctgggctgcagattcggagctggcgctcatgtacaacgatgagtcggtgctcgagaatcaccacctggccgtgggcttcaagctgctgcaggaggacaactgcgacatcttccagaacctcagcaagcgccagcggcagagcctacgcaagatggtcatcgacatggtgggcggggctggggcgggacggagcgggaaaggaagcctaggagtcgagggctttggggaggagtgggtctgagtcccagaggaaccctcaacctggacagagcgggcggcttctacctggtgaaaacttcagaggcccgggtcagtctggggggcgggtgtcagcggccccagtgacgcccccttgcccgcaggtgctggccacggacatgtccaagcacatgaccctcctggctgacctgaagaccatggtggagaccaagaaagtgaccagctcaggggtcctcctgctagataactactccgaccgcatccaggtgcccccacgccccatcatctaaggagggaggacactcccccagccacacctttaggtctgggtagctaactgccccttcctcagcctctttctcccaagtggcccatcttcctgtgtccttctttctttttttttgtttgtttgtttttgagacggagtcttgctcttgttgcccaggctggaatgcaatggcgccatcttggctcaccacaacctccgcctcccgcctcccgcctcccgcctcccgggttcaagcgattctcctgtctcagcctgccgagtagctgggatcacaggcatgcgccaccatgcccagctaattttgtacttttagtagagagggtttctccatgtctgtcaggctggtctcgaactcccgacctcaggtgatccccccccgccccccgccttggcctcccaaagtgctgggattacaggcgtgagccaccgcgctcagccctctttttttaaatttatttttatttactttgtatgtttaaaggagagttggggtctcactatgtcacccagtctggtctcaaactcctgagctgaagttatcctcctgtcttggcctgccaaagtgctgggatagctggcgtgagccaccacacctgacctctttctgtctgtccccttctccatcttcactttccaatcccatctctccttcccatctctcccaccatttcctcccatttcccccaattcctcctttcttctcatcaactccttccaggtcccctgtccctctccctaaccatcttctcttccctcaccccccttccgactcctcccatattttctccatctcccacacacctctccccgttacctcctctgttctctgttctccccaccttctctccctactccctccctccccaggtgggagataagaaagcctgaaagctgggtgtggtggctcacgcctataatctcaactactccagaggctgaggcaggaggactgtttgaggccaggagtttgagaccagccagagcaacattgcaagatcctcttttcctttcctttcctgtcctgtcctgtcctgtcctttcctttccttcttctttctctttcttcttttctgtttttggttttttttttttgagatcgggtctctctgtcacccaggctagagggcacggatcttggttccctgcaaactccgcctcctgggctgcagcaattctcctgcctcagcctctagcgtagctgggattacaggtgcctaccaccagacctggctaatttttgtatttttagtagagatggggtttcgccatcttggccaggccgatctcaaattcatgacctcaagtgatctgcccaccttggcctcccaaagtgctgtgattacagatgtgagccaccgcgcccagccccattcttttttttttttttttttttttctgagatggagtctcactctgtcgcccaggctggagggcagtggcttgatctcggctcacggcaacctccgcctcctgggttcaagcaattctcctgcctcagccccactatagctgggattacaggcatgtgccaccgtgcctggctaatttttttgtatttttagtagagacagggtttcaccatgttggccaggctggtcttgaactcctgacctcatgatccacccgcctcagcatcccaaagtactggaattacaggcgtgagccacagtgcctggcccccatttcttaaaaaagaaggaatgcctgaggtctcagactgggacacaggcatagcctctgaagtttcccctgtgccccaaccccatgcaggtcctccggaacatggtgcactgtgccgacctcagcaaccccaccaagccgctggagctgtaccgccagtggacagaccgcatcatggccgagttcttccagcagggtgaccgagagcgcgagcgtggcatggaaatcagccccatgtgtgacaagcacactgcctccgtggagaagtctcaggtacaggctcggggcattgatggacgggcacagggtgagtctccccagcccatcttggcctgaagttctgaggcccaggagctcctcccctgcctttccacaatgccaagttgtcctgtttttggttttgttttgtttttgagacggagtctcattctattgcccaggctggagtacaatggcacgatcttggctcactgcaacctccgcctcccaggttcaagtgattctcctgcctcagcctcccaagtatctgggattacaggcgtgcaccaccatgcctggctaatttttgtatttttagtagagatggggtttcaccgtgttggccaggctggtcttgaactcctgaccttgtgatctacccgccttggcctcccaaaatgccaggattacaagtgtgagccactgcgcccagcctcctgtttttcttttatttaggttttatttatttattttgagaccgggtcttgcactgttgcccagggtagcatgcagtggtgtgatcatagctcactgcagccttgaattcctgggctcaagcgatcttcctgcctcagcctccagagtagctgagaatacaggtgcacaccaccacacctagctaattttttaaaattttttgtcgagacagggatttgctatgttgccagacttgtcttgaactcctgggctcaaaccttggcctcccaaagtgctgggatatggggtgagtcaccatacccggccttgttttcatttttctttttcttttttttctgagacagggtctcattgtgccacccaggctggagtgcaggggcgtgatcttggctcactgcaacctccacctcctgggctaaaatgatcctccacccccgcctccagagtggctgggactataggcgtgcaccaccacactcggctaatttttgtatttttcatggagatggggttctgtcatgttgcccaggctggtctcgaactcctgggctcactcagtctgcctccctcagcctcccaaagtgctgggattacaggggtgagccaccctgcctggcccctccccactttatatcctccctggtgaaacccaaccatctgagtttgatgtctctacccgtccagacctgagtttctaggcctcagcactgttgacatttgggtgatcattttttgtgctaggagctgccgtgggtattacaggattcttagcagaatccctggtctctctctacccactagatgccagaagtatccccctcctcattttttttttttttgagacagagtttccttcttgtcacccaggctggagtacagtggtgcagtctcagctcactgcaacctccgcctctcgggttcaagcgattctcctgcctcagcctcccgagaagctggaattacaggcatgcgccaccacgcccagctaattttgtatttttagtaaagatggtgtttctccatgttggtcaggctggtctcgaactcccgacctcaggtgatccgcccacctcggcctcccaaagtgctgggattacaggcataagccaccgcgcccagcctccccctgctcatttgtaaagaccaaaaatgcctccagacattgccaaatgtcccctaggtgtgcaaaatcactcacacacaccccatggaaaactaattttatacactttataacgtagttatgttcataggcaacttcatagcaatagtttgtggctttagcttttttttttttttttttttttttttttttttttgagatgaagtctcactctcgttccccaggctggagtgcaatggcgcgatcttggctcactgcaacctctgcctcccgggttcgagccattgtcctgcctcagcctcctgagtaggtgggattacatgtgcccaccaccatgccctgctaatttttgtatttttagtagagacagggtttcaccatgttggccaggctggtcttgaactccagacatcaggtgatccacccacctcagcctcccaaagtgctgggattacaggcgtgagccactgcatccggcctacttttttttttttttcctgagacggagtctcgctctgatgcctaggctggagtgcaatggcacaatctcggctcactgcaacttccacctcccaggttcaagcaattctccctgcctcagcctcccgagtagctggaattgcatttagctttttaaaaaataggccaggtgcagtggctcacgcctgtaatcccagcactttgggaggccgaggtgggctgatcacaagatcaggagatctagaccatcctggctaacacagtgaaaccccgtctctactaaaaatagaaaaattagccaggcacgatggcgggcgcctgtagtcccagctactcgggaggctgaggcaggagaatggcgtgagcccgggaggcagaggttgcagtgagccgagatcgagccactgcactccagcctgggtgacagagcaagactccgtctcaaaaaaaaaaaaaaaaaagtgtgtgtgtgtgtaaactgcatcaatgtatacatttttttgtttttgtttttgagacggagtcttgctctgtcacccaggctggagtgcagtggtgcgatcgcagctcattgcaatctccgcctcccaggttcaagcgattctgtctcagcctcccaagtagctgaactacaggcatgcaccaccacaaccagctaatttttgtatttttggtagagatgcggtttcaccatgctggccaggctggtctcgaactcctgacctcaaatgatccgactgcctcagcctcccaaagtgctgggattatagacatgagccaccatgcccggcccataagcatgtttttcatttcattagctcccataatgtggtggtatcatccaccccataggccgcccatttatactttcttcccctccaccaggtgggttttattgactacattgtgcacccattgtgggagacctgggcggaccttgtccacccagatgcccaggagatcttggacactttggaggacaaccgggactggtactacagcgccatccggcagagcccatctccgccacccgaggaggagtcaagggggccaggccacccacccctgcctgacaagttccagtttgagctgacgctggaggaggaagaggaggaagaaatatcaatggcccagataccgtgcacagcccaagaggcattgactgcgcagggattgtcaggagtcgaggaagctctggatgcaaccatagcctgggaggcatccccggcccaggagtcgttggaagttatggcacaggaagcatccctggaggccgagctggaggcagtgtatttgacacagcaggcacagtccacaggcagtgcacctgtggctccggatgagttctcgtcccgggaggaattcgtggttgctgtaagccacagcagcccctctgccctggctcttcaaagcccccttctccctgcttggaggaccctgtctgtttcagagcatgccccgggcctcccgggcctcccctccacggcggccgaggtggaggcccaacgagagcaccaggctgccaagagggcttgcagtgcctgcgcagggacatttggggaggacacatccgcactcccagctcctggtggcggggggtcaggtggagaccctacctgatccccagacctctgtccctgttcccctccactcctcccctcactcccctgctcccccgaccacctcctcctctgcctcaaagactcttgtcctcttgtccctcctgagaaaaaagaaaacgaaaagtggggtttttttctgttttctttttttcccctttccccctgcccccacccacggggcctttttttggaggtgggggctggggaatgaggggctgaggtcccggaagggattttatttttttgaattttaattgtaacatttttagaaaaagaacaaaaaaagaaaaaaaaaagaaagaaacacagcaactgtagatgctcctgttcctggttcccgctttccacttccaaatccctcccctcaccttcccccactgccccccaagttccaggctcagtcttccagccgcctggggagtctctacctgggcccaagcaggtgtggggcctccttctgggcttttcttctgaatttagaggatttctagaacgtggtcaggaatagccattctaggcggggctggggccagggtggggggcagtcactgtgggaggtcccagctccagcccccctctggtttgctgcctcctctcccctctaaaaaagtcttccgcttgattttgcacaatcccggcgatactcctggcgatactgactagaaagtcagggagctgggggagctgttcactttaggatacgggggtggtatggaagggagcgttcacaccgccagcctcgggcctgggatttgaggagggccctagacctcctccactctccatcccctttcccttccactttgggttcactttgaattttctccgttttttggggcagtggctctgatccactcacccccccgccccccgccccacttctagctgcttctcctcttgtttctgccttaataattcccacggccacaggcaagggggttgcagtggccgcctgcaccttggatgaggcagggccaggcgcccagaacccccatcctggccgcacccccctttccagggtcctccggaccccaccttccacactctgatcacagcccccctaccttttgccctaggaggaagcaataatggtgtataccctcattctcattcctgggcagcccttccttccaccctggcaccaaaataatttctcctccatccgtaccttgcctagcctctccctctcccccagctagtccctgagcaatacggcagacagatgcaagaccatttttctccaagccatgggggactgtttggaaggaaagccccctctctccctcctcccctcgccctcggcctggttctgcagctggaccgacctcattcatcgcctgccccctacccaattctgagcacacggtactgtagcccccagttcctccctagccttccatccctctgtccaccccagggggaggtaaccccgcactcacactcccttgatgctgtctgtacagggttcatattttgtagcgaaagtcgtttttgtcccagccggcgatcggagtgggccttttctttctttttgttcattctttacctttttttcttttctttctttcttttttgtacatactgtaaggttggtttgtaaattattctacggaggcaaaaagggaaaataaaaacttgcccttccctggctgacccagtcgggaaggtagggaaggaggtctcccgttgggagagtctctgttcctgctgtattatacaaactgtaccatagtcctgggaaaagggtggactcaccgctgttgttttatgggaagtcgtgtcatcctaggggttggggctgggcagagcctgtcccctccccccttctccaggagccagggggtgactggagagacagacccacccccaagcagggctcctctccccagggtgagcacaggacctctgtaagctgcttgtgtattgtccactttgacgatcagtcattcggtccgttgatcaataatccttcgatcttgtctccaattaaaccgaggctttcaccgattttcctggctgatgtggcttcattccccatgttgtttgttgaggtgtctccccgctgcaccgtctgcttgggttggggagggagtttctgtccctacttgttccccagcagacggaattgtgaagtagagcttggacagagacattccccagcctgagtcaggttataaaatggaaattcaagccatgcagggtttgttttgttttgttttgtttttgagatggagcttccctcttgttgcccaggatggagtgcaatggcgccatctcggctcactgcaacctccgcctcccgggttcaagcgattctcctggctcagcctcccgcgtagctgggattacaggcgcccgccaccatgtctggctaattctttgtatttgtcgtagagatggagtttcaccatgttggtcaggctggtctcaaactcctgactttgggagatccacccgcctcaacctcccaaagtgctgggattacaggcatgagccattgcacccagccccatgcagtatttaaaagggaaaagatgtggctgggcgcggtggctcacgcctgtaatcccagcaccttgggaggccgaggcgggcggatcatgaggtcaggagtttgagaccaacctggccaatatagtgaaaccccgtctctactgaaaaatagaaaaattagccgggcgtggtggtgtgtgcctgtagtcccagctacttgggaggctgaggcagaatagcttgaacccaggaggcggaggtttcagtgagctgagatcatgccactgcactccagcctgggtgacagaacgagactttgtctcgaaaagaaaaaaaaaaaggcaaaagactacccagtgcaaaggctcatgcctgtaatcccagtgttttgggaggccgagatcagcgcaggagttcaggacaagcctgggcaacatagtgagaccctgtctctattaaaaattttaaaaattggtcaggcacggtggctcatgcctgtaatcccggcactttgggaggctgaggcggctggatcacctgaggtcaggggttcgagaccagcctgaccaacatggtgaaaccctgtctctactaaaaatacaaaaattagctgggcatggtggcgcattcctgtaatcccagctactcaggaggctgatacaggagaattgcttgaacccgggaggcagaggttgcagtgagccgagattgtgccacttgtactccagcctgggtgacagagtgagactctgtctcaaaaaataaaaaaaaaattttaaaaagttagccagtggtggtggaccatccctgtggtcccaggtacttggaaggctgaggcaggaggattgcttgagcctgggaagtagaggttgcagtgagacgtgcccatgccactgcactccagcctggacaacaagagcaaaaactctctaccaaaaaaaaaaaaaaaaaattaatggcatggtctctctctgttttccaggctgaagtgctgtggcacaatcagctccctacagccttgaacttctgggttctagagatcctcctgcctcaccctacctagtagctgggattacaggtggatgccaccacacctggcctaacccacatacttgaatgctgttaattccactcacagagcctaattttcccacatttattaggctttttttttttttttttttttttggtggcagagtgagactctatcacccagtctatagtgcagtggtatgacatgatcatagttcactgcagcctcaacctcctggacttcagtgatcttcctgcctcagcctcccatgtaggcaggaccataggcgggtgccaccacgcccggctaatttattttttattttgtagagacagggtctcggtttgttgcccaggctggtctcaaactcctgggctcaagcaatcttcccaccttggcctcccaaagtgctgggattacaggcgtgagccaccacacccagccctgttaggctgattaacaagcccctggttttaccaataggtttctgacattcattatactaatgagcaaaacttctgaatatagataaagatatggatagtggaaatgtttgtgatttggaccttgattagaatactggctgcctcggctgggcgtggtggctcactcctgtaatcccagcactttgggaggccgaggcaggtggatcacctgaggtcaggagtttgagaccagcctgaccaacatggtgaaaccctgtctctactaaaaatacaaaaattacctgagcgtggtggcacgtgcctgtagtcccagctacctgggaagctgagacaggagaattgcttgaacctgggagctgcaggttgcagtgagcccagattataccactgcacttcagcctgggcgacagatcgagactccgtctcaaaaaaagaaggaaaaaaaaaaaagaatactggctgcctctggggcttaataaaccaggatgcacatgaatacatacagtgcttgagtaggtagacacaagggggcactagacatatatttttatacaatgcatgttctgaaacatgagagcatcttgcgtgggtccaaggaaaagtccacctgcctactctgccatttgtttctagtccagggactctgagatttttttctatttttcttttcttttcttttttttttagacgcggattggttctgtcacccaggctggagtgcagtggcatgatcagggctcactgtagcctagaccctctgggcccaagtgatactcccaccttagcctcctgagtagctggaatgataggtgtgcaccaccaagcccagctttttttttttttttttttttttggtagagatggggatctccttatgctgatcaggctggtcttgaactcctgggctcgagagggaatctgattggtgatcttgggggcgatctctctgagcttcacttgtttcttctactaaatggggatatattagctgagtgtagttgtgcgcacctgtagtcccagctactccggaggctgaggcaagaggatcacttgagcccaggaggtcgaggctacagtgaactgtgattgtgccagtgcactctagtctgggtgacagagtgagacactgcctcaaaaaaaaaaaaaaaaagtaaataaataaaatggggccaggtgtggtggctcacacctgtaatcccagcactttgggaggctgaggcaggcggatcacctgaggtcaggagttagagaccagcctggccaacttggtgaaaccttgtctgtactaaaaatacaaaaattagccaggcgtgctggcggggatctataatcccagctactggggagtctgaggcaggagaatcacttgaacctgggaggcagaggttgcagtgagccaagatcgcaacattgcactccagcctgggcaacaagagtgaaactccatctcaaaaaaaaagaattaattatttaaataaaatgggataatgacagttacagagttaaacagttgctctatagtacggtttggctagtaaaactttctttaaaaaaaaaaaggtgtagagatggggtctcaccatgttacatgcccaagctgatctcctcgaagtcctgggctcaagcaatcctcctgccccagcctcccaaagtgctaggattactagcactttgaccctaaaatcaggtgtgagccactgttcccggcctcagtaaaactttctgtggtaataggaatattctttatctgtgctatccaacaagtcagcaactagtcacatgtggctattgcgcccttgaaatgtggccagttttaatttccggccacagtggtggccagaagctactgtattggacttaaattctaaaaattcagccagagttaatggaaaatatttaggctatacaaagagttgtttgacaacagctgtaaagattcacagaagatagaacctagaaaagtgggaggagagaagcagagctcgaaaaataggtagaagttttcagggaatctgaactttgcaagaagtgaaaaggagacacagacattttccccagggactttcaaatggaggcagagtcgggaaaagggctttgggctgggggtcaggaggtgacagcactaattctagcctgcagtggactgtgggtgaccttagacgagatttctccttccaggcctcagtttccccaagtgtaaaagggtgggctgggtgcggtggctcacacctgtaatcccaacactttgggaggccgaggcaggcagatcacttgaggtcaggagttggagaccagcccaaccaacatggtgaaacccgcgtctcaactaaaaatacaaaaagattagccaaatgtggtggcacatgcctgtaccagctactcagaaggctgaggcaggagaattgcttgaacctgggaggtggagcttgcagtgagctgaggtcaagccactgcactccagcctgggcgaaagagcgagactccgtctaaaaaaaaaaaaaaaaaagaccaggtgtggtggctcacacctgtaatcccagcactgtgggaggccgaggcgggtggatcacctgaggtcaggagatcaagaccagcctgaccaatatggtgaaaccccgtctctactgaaaatacaaaaattagctggacgtggcggagggcacctgtaatcccagctactcgggaggctgaggcaggagaatcgcttgaacccgggaggtggaggttgcaatgagctgatatcatgcccctgtacttcagcctgggtgacagagtgagactttgtctcaagaaaataaaaaaatttttttaggccgggcgcggtggctcacacctgtaatcccagcactttgggaggccgaggcgggcggatcacaaggtcaggagatcgagaccatcctggctaacacggtgaaaccccatctctactaaaaatacaaaaaattagccaggcaaggtggcaggcgcctgtagtcccagctacgcgggaggctgaggcaggagagtggcgtgaaccccggggggtggagcctgcagtgagccgagatcatgccactgcactccagcctgggcgacagcaagactccgtctcaaaaaaaaaaaatttttttaaaaaaagggcagatgtgatgttcggaacacctcctgtattgggacagactgaaaatatgggtcaaaaatggcagtgatggccgggtgcggtggcccacgcctgtaatcccagcactttggaaggccgaggccggtggatcacctgaggtcaggagttcgagaccaacctggccaacatggagaaaccccgtctctctaaaaccccaaaacttatccaggcatggtggcacacacctgtagtcccagctactcaggaagctgaggcaggagaatcgcttgaacccgggaggcagaggttgcagtgagtggagattgtgccattgcactcaagcctgggcaacaagagtgaaactctgtctcaaaaaaaaaaaaaaaaaaaaaaatggcaatgacacatgaccatcagctggctctccagggtggggaattcaccttttttccagcaaaggtgaacaagggcagtggggcacagcagggaggccacgtaatctgaaggaggccaggggaacctggggaaggagtggagtcggttcattatctgaaattgacatcaaggcttgcaggcttcctggtactggtcttgagcaaatggctccgcctctcccagactttagagggctctatcctgtgctaaactttttaagattatctcattgactctccagctgttcttgagatatggactagcattggttccattttgcaattgaagaaactgagggctgggatgagatcgcacaatatggagaaaattcgaggaaataagacgaggacctcgcttcacccagtgcctgttcaacagtgatagctgtccccatacttttatgttatttcaggtgcacgaaatcttgagatgtaggtagtatttctccctctctaacagcataaaaacgtgtcagtgccggccaggtgtggtggctcacgcctgtaatcccagcactttggacgtggtggcgggcacctgtaatcccagctactcgggaggctgaggcaggatagtcccttgaacctggaaggtggaggttgcagtgagctgagatcatgccactgcactccagcctgggcaacaagagtgaaattccatctcaaacaacaacaaaaaaaagtcaatgcaaatcaaaataagacatttattttttattttcttttgcaaagcattttcacagctcatttctgttcgtgcaagctagaacatacagctttccaggaatggtctgacaatatttatcaaaaacataaccagctgggcgcagtggctcttgcctggaatctcagcacttttggaggctgaggtgggaggatcatttaagcctaggaattcaaaaccagcctgggtgacatagtgagacatgtctgtctgtctttctttctttctttctttctttctttctttctttctttctttctttctttctttttctttctttctttctttctctccttccttccttccttctttccttccttccttccttccttctttcttttctttctttcgagacaagatctcactctgttatccaggctccaggctgcagtggctaattgcagactcaacctccttaggctcaggtgatcctcccaactcagcctcccaagtagctggtattagaagcatctgccaccatgccaggctaaatttttttttttttttttttttgctcttttgtagagatggagtctcgccatgttgcccaggctgttctcaaactcctggactcaagcgatcctcctgcctcgcccccccaaagtgctgggattacaggtgtcaaccatcgcacctagacctgagacatgtttctaaaaaaaattttttttttgagacaatgtttcactcttgttgcccaggctggagtgcaatggtgtgatcttggctcactgcaacctcggcctcccgggttcaagcgattctcctgcctcagcctcccaagtagctgggactgcaggcacccaccaccacgcccggctaatttttttatttttagtagagatggggtttcaccatgttgtcctggctggtcttgaactcctgaccccaggtgatccgcccgccttggcctcctaaagtgctgggattacaggcgttagccacagtgcccggccaaaaatttttttttttttttagacggagtttcgctcttgtcgcccaggctggagtgcaatggcacgatctcagctcaccgcaacctctgccttccgggttcaagcaattcccctgcctcagcctcccaggtagctgggactacagggatgcgccatgacgcccgactaatttttgtatttttagtagaaacagggtttcaccatcttggccaggctggtctcgagctgctgacctcatgatccacccgcctcgacctcccaaagtgctggaattacaggcatgagccaccgtgcctggccaaaaaatatttttttaaagatgcaactgcttggccaggcacggtggctcatgcgtgtaatcccagtactttgggaggccaaggtgggaggatcacctgaggtcaggagttcaagaccagcctggccaacatggtgaaaccaacctcatctccacaaaaataacaaaattagccaggcatgatggtgggtgcctgtaatcccagctactccagaggctgaggtgggagaatcgcttgaacccatgaggtggagggtgcagtgagccgagatcgtgccgttgccctccagcctgggtgacagagtgagactgtctaaaaaaaaaaaaaaaaaaaagatgcaaagatgcaaatgctcaaatatctaaagtaaaaaatgtctctattctccttggtcagaatagtgaagaattattaataatccaggtgaccactattaaggagttattaaattacttttcacctatatgatggaataatatgcaaccattaaaaatgatcaagtgggctgggcgcagtgacttacgcctgtaatcctagcacttttggagaccgaggctcgtggattgcctgagctcaggagttcgagaccagcctgggcaacacagtgaaaccctgtctctactaaaatacaaaaaattagacgggcgtggcagtatgcgcctatagtcccagctacccgggaggctgaagcaggagaactgcttgaacccaggaggccgaggttgcagtgagccgagattgtgccactgcactccagcctgggcaacagagcaagactccgtctccaaaaaaaaaaaaaaaaaaaaaaaatcaggtggatctatgtttattgaaatggccagagatattcacagtcagaacagcaggtttcaaaatattctgtattatatgatcctactgaaaagtaacatgcagagaaaaggcagttacccatccagatattcacagtgtctccagtggtgggattaagaaagatctgtgtcttcaaacactgcggaaggccgcagggtcctctgcctaggaaaaccagagacctttgttcatatgtttatctgctaaccttctctccactattgtcctatgaccctgccaaatccccctctccgagaaacacccaagaatgatcaataaatactaaaataattttttaaaaaagaaagatctgtgtcttgtgtagtctttgacattttctgaacattttgcaatgagcatatattacattcattgatgatcgattgattgggacagggtctcatttgtcacccagactggagtgtagtggtgcaatcacagctgactgcagtctcgacctctcaggctcaagcaatcctcctgcctcagcctcccaaatagctgacaggcacctgcccctgcccccagctacttaaaaaaactttttgtaaagatgggttctcactatgtcgcccaagctggtctcaaactcctgggctcaagcgatcctcctgcctcagtgttgggattacaggcgtgagtcactgcacccagtctatattacttttataatcagaaagttattttataatcaggggaaatgaaaaacatctggtatttattatctgggaggcacaaaaacgtggtggataagcacacagattctagattcagctttcctggattttggctccaactcagccaagttaatggctgggttagtctgggcaggttactggccaaggggggaaaccatgcctcagtttcccccattgtaaaatccaaataacaatagcttaggtttaccgagaggttgttatgtgacaagcactgtttgttttacgtaaatcatcgaggtaaatgctcacaacagccctattaagtaagtactattattataaaaagggtcacaggcataggcagggaaggaggtagggctgggagtcggagcccgtgagcgccccctagagtagggctaaggggcgggggggcgggctacagcagaatagggacccagcgcactcgcagaacgaggggggaggcgaggcgagaacgagcgggagtttttttcccgactacgattggctggtgtaattgtcatcacttgaaaaggcagccaatgagaggcgcggtcgcctcgctggtggaagccgagagctgagcgaagtgaggcgtgcggagccaaaggcgctagagcgatagcgggagccccggaccccgaagcggttgaggggatccaggcctcacaacgtcttgagagtggccccagcgtcgttcctagtctcttcggcagaccccagcgtcgtccttcttttcctgagaatatcctgacaccagtcgcccgttccagaaggggacacttggcgtcatccctttttttctgagtgaccccagagtcgtcctcacttcctgagggggatcctggcgtcatccgcccttcttgaggggaccctgctgtcactaccctgtcctgatggccagcaccgcattgtcctttcttcccgcgggaaacccggacatcatcccctctttctggcggggacccccatgccattatcccctcctgaggagaccccagagccagagccgtccccccttcctcaaggctccccagcgttgtttcttcttcccgagaaggggcctggtgctgttccccgtttccagagtgtttcctatcgttgtcctccccacactcagaaggcatctgtcatcccccctttttctgagatcagtcccttcctcctttccagtttaaggccgacccctgcaaacgcttctgtggcacccatagatagaaggcccaaagacccccctgtgctcccttgcccccaattgagcagacgggaaggcaaaagactcagctcaccccatgaagatgggaagaaaccgaaactagctgatgaaggaactcactatgccacatgagaaatcatttagggccgggcgcagtggctcacgcccataatcccagaactttgggaggccgaggttatcatataagatcaggagttcgagaccagcctggccaacatggtgaaaacccgcctctactaaaaaatacaaaaattagccgggagtggcggtatgggcctgtaatcccagatactcaggaggctgaggtaggagaatcgcttgaacccagcaggtggaggttgcagtgagccgagatcacaccactgcattccagcctgggcaacagagtgagactccatctcaaaaagaataaataaataaaaagaatttgccagtcaacaacaatttttttttcttgcctcccgggttcacgccattctcctgcctcagcctcccgagtagctgggactatgggtgcctgccaccacgcccggctaattttttgtatttttagtagagacggggtttcaccgtgttagccaggatggtctcgatctcctgacctcgtgatccgcccacctcggcctaccaaagtgctgggattacaggtgtgagccaccgcgcccggtcaaatacaaaattttaaaacaacttttatatatactcagttaaggcagacaaaacaagtctctgattatttcattcactgaggcaatattaatttttgagacacttccacacagatttacattttaaaaaaaatgtcaggtgcggtggctcactcacacctgtaatcccagcactttgggaggctgaggcgggcggatcacgaggtcaggagatcgagaccatcccggctaaaatggtgaaaccccgtctctactaaaaatacaaaaaattagccgggcgtagtggcgggcgcctgtagtcccagctacttgggaggctgaggcaggagaatggcgtgaacccgggaggcggagcttgcagtgagccgagatcgcgccactgcactccagcctgggcgacagagcgagactccgtctcaaaaaaaaaaaaaaaaaaaaaaaaggaaacttaagggccaggcacggtggttcacgcctgtaatcccagcactttgggaggccgaggtgggcagatcacctgaggtcagaagttcgagaccaacctgaccaacatggagaaaccccgtcactactaaaaatacaaaattagccaggcgtggtggtgcatgcctgtaatcccagctactcgggaggctgaggcaggagaattgcttgaaccggggaggcagaggttgcagtgagccaagatcacaccattgcactccagcctgggtaacaagagcgaaactctgtctcaaaaaaaaaaaaaaaaaaaaaaaaaaaaaaaagaggctggggggtggctcatgcctgtaatcccagcactttgggaggccaaggagggcagatcaggaggtcaggagatcgaaaccatcctggccaacatggtgaaaccccgtctctactaaaaaaaaaatacaaaaaattagctgagcgaggtggctgatgcctgtagtcccagctactcgggaggctgaagcagaatggcgtgaacctgggaggcggagcttgcagtgagctgagatcgcgccactgcactccagcctgggcgacagagcgagactccgtctcaaaaaaaagaaagggaaacttaaaatattcataaagattaatcgagtgaaaggccaggtgccgtggctcacgcctgtaatcccagcactttgggaggccgaggagggcggatcatgaggtcaggagatcgagaccatcctggctaacacggtgaaaccccgtctctactaaaaatacaaaaaattagccgggcgcggtggcgggcacctgtagtcccagctactcgggaggctgaggcaggagactggcatgaacctgggaggcggagcttgcagtgagccgagatagcggcactgcaatccggcctgggagaaagagcgagactccatctcaaaaaaaataaaaaataaaataactgagtgaagggggacaggtgctttggcttatgcctataatcccagccctttgggaggctgaggcaggagaaactcttgaggtcaggagttcaagaccagcctgggcaacatagcctgcttggtggcgtacacctgtggtcccagctacttgaaagactgaggtgggaggatcacttaaaactgggaggtcatgcctgtagtagtgagccttgatctggccatagccctccagcctggacaacagagtcactctgtctcgaaaaaataaataaaaataaaaaaataaactgagagacggccaggtaggatgacatgtgaggagtagacggatgtagggtagaaataaaagagaccccatgtaggatagttgagacttgagggaaaaataaaccaacttcttgggtaatgtaattattagtctttcaggcccctgaagctgagcgtaaatgaaggctgaggcaactgaagttggcactaggagattcggtttccttttcttaccacccttatcaagataattgcttaatcccggaggatcctgggacatgtagtctaaaaagagtgttcctgctttaaaaggtggcaccggccgggcgcggtggctcacgcctgtaatcccagcgctttgagaggccgaggcgggcggatcacgaggtcaggagatcaagaccatcttggctaacacggtgaaaccccaactctactaaaaatacaaaaaattagcccggcgtagtggcaggcgcctgtagtcccagctactcgggaggctgaggcaggagaatggcgtgaacccgggaggcggagtttgcagtgagccgagattgcgccactgcaccccaaactgggtgacagagccagactccgtctcaaaaaaaataaaataaataaaataaatataaataaataaaaggtggcaccacaggccgggcgcggtggctcacgcctgtaatctcagcactttgggaggctgaggcgggcagatcacgaggtcaggagttcaagaccaccctgaccaatatggtgaaatcttgccactacttaaatatacaaaaattagcgggacatggtggcacatgcctgtagtcccagctacttggaaggctgaggcaggagaatcgctcgaacccaggaggcagaggttgcagtgagccaagatcacaccactgcgctccagcctgggcaacaaagcgagactctgtctcaaaaaaaaaaaaaaaaaagtttgcgccataaaattagttacaaccctgagcagtggatagggtgctggtgcttgcaggagggcgagtcctttaaatagggaactccctcaaagcatgtgcacttttatttgatttataagaaatatcatttggtccaaagttttgaagaatgaaacagatgtttgctcttgttgcccatgctggagtgcagtggttaagatctcggcttaccacaacctccacctcccgggttcaagcggttctccttcctcagcctcccgagtagctaggattacaggcatgtgccaccacgcccggctaattttgtatttttagtagagacagggtttctccatgttagtcaggctagtctagaactcccgagcttaggtgatctacccatctgggcctcccaaattgctgcgattacaggcgtgagccaccccacctggcccggagaatgctacttttaaaaataggaacaagccaggagctcatccaatcttgttccttttctaactttctttctctggaaatagttccttttctaactttctttctctgggcctctttcacccagaggcccacaagagggtgctgtctgccttttagatggaacttcctgactctgccctgagggtattcatcccagagctatacctcccgggttcaagcgattctcctgcctcagcctcccgagtagctgggattacaggcacatgccaccacgggcagctaatttttgtatttttagtagagacagtgtttcaccatgttggccaggctggtcttgaactcctgacctcaggtgatccgcctgcctcagcctcccaaagtgctgggattacaggcgtgagccaccacacccagccttattttattttagagtcaggggtattgctgtgtcacccaggctagagtgcagtggtgcagtcatagctcagtgcagcctcaaactcctgggctcaagtcacctcccgcctcagcctcccaaagagttgtgattactggcatgagccattgtacctggacagcctgtgaattttacttatttattatttttatttttgagacagagtcttactctgctgcccaggctggagtgcagcggcgcgatcttggctcaccacaacctctgcctctcgagttcaagtgattctcgtgcctcagcctcctgagtagctgggattacaggcgtgcaccagcacccccagataatttttgtattttttagtagagacagggtcacactacgctgtccaggctggcctcccaactcctgagcttaaacaatccacctaccttggcctcccaaactgttgggattataggcaggagccaccacacctggcccagcctatgaattttatctatttatttatttattattattattttttgagacggtgtctcgctcagtagcccaggctggggtgcagtggcgcgatcttggctcactgcaagctctgcctcctgggtttacgccattttcctgcctcagtctcccaagtagctgggactacaggcgccagccactgcgcccggctaatttttttttttttttgtatttttagtagagacggggtttcaccgtgttagccaggatggtctcgatctcctgaccttgtgatccgcccgtctcggcctcccaaagagctgggattacaggcgtgagccactgcgcccagccatgaattttaaattatacaactaaagtggtctgctgtgaaatgttatcatgatcattctaacgtcaacagtcttgacaattctgcccaatttcagcatttcaggtttccagtacttaactcattcctaagtaaataatactacattacaaggcaaggtgacacacacctgtaatcccagcactttgggaggccgagtcaggggatcccttgagcccaggagttcaagaccagcctgggcaataaggcaaaacctcatttctataaaaaatacaaaaattagctgggcatagtggcacatgtctgtagtcccagttactgaggaggctgaggtgggaggatcacttgagcccaggaattcaacgctgaagtgagctactatccctccacttcagccggggcaacagagcaagaccttgtctctgggaaaaaaaaagaaaaacttgaaagagaagaactattgaggaaggaaaagggtgatacctttggttgtgtctaaatttaccaggctgcacgtggtggctcatgcctataatcccagcactgtgggaggccaaggtgggtggatcacttgaggtcaggagttcgagaccagcctggccaatatggtgaaacactgtttctactaaaaatacaaaaattagctgggtgtggtggtgcgcagctgtaatcctagagactcgagaggctgaggcaggagaatcgcttgaaccctggaggaggaggttgcaaaactccgtcttgaaaaaaaaaagtaggccgggcatggtggctcacgcctgtaatcccagcactttgggaggccgaggtgggcggatcacctgaggtcaggagttgagatcagcctcaccaacatggagaaatcctactgaaatacaaaactagccaggcgtggtggcacatgcctgtaatcccagctactcgggaggctgaggcaggagaatcacttgaacctaggaggcagaggtcgcagtgagctgagatcccgccatcgcacttcagcctgggccacaagggcaaaactccatctcaaaaaaaaaaaaaaatgaccttggggagccctaggagatgtgactaggaattagctgcttgtcttccaaggcagctgaaactgaaggacaactgtgtggcttgcctacggggagaaagatgccctacatataaaaatgcgatgggcaaagattacaaactggtttcaaataccagccctaagtcaaagaggagtgtgtttcagaagaagagccctttctggcccccggtttcaggcctccagcccagagccagggtgaaagacactagttagtctgttctttattttccttggaaaattacagggttacttatcaacaaaataactgtccatccggtggggaagtgccatccggtggcttctatgtacaggcccatccctgggaaccacatttccagagggggcctccccctgaggcccccattggccccctcccaggtatccaagaataaatcacatggtgacagctgccggcatgggtgagtgggacccaggcctattacccggccagagggtttgggggcctctctcctggaagcctgctctttccacaccccctttcccagccaggctgtcttggacactcccggggctccgctgaggggcacatgattcccgctttggacttcttttgagatgtcattttaacactgaggcatcctggcctcccttcccggaagatgggttatttgcagtgctgtcttttcttttagtcccggtttttgtacaaaaacaatgatactccccattggactgtatttttgcccaagaaacaaaagtgcctcaacaggtacagttctgctggtcaatctgcttccggcagggctccatggtgacagccacgcccaccccactccggcccgatgtcattcgggtcacctcgctccaggtgtctgtatctgggtcgtaacactccacactgtccaggaacgtgtgaccatcatagcctcctgcgggaagaacagaagggatggtcaccacctgtcacaccacatccaagagcaggggacagaaagagagagatgcagctgtgagatgcaaaagcaggccgggcgtggtggctcacgcctataatcctagcactttgcagggctgaggcaggaggattgcttgaggccaggagttcgaagccagcctgggcaacatagcaaaaccttagtctcttactaaaaaaaaaaaaaaaaaaaaaaaatggccaggcttggtagctcacgcctataatcccagcactttgggagactgaggtgggtggatcacttgagtccaggagtttgagaccagcctgggcaacatggtgaagccccatctctacaaaaaaacataaaaatttagccaggcttggtggtgcgcgcctgtagtcctagctattagggaggctgaggtggggaggatcagttgagtctgggaggcagaggttgcagtgagcagaggctgcaccactgtactctagcctaggcaacagagtgagaccctatctcaaaataaataaataaaaataggaaaataggccactcgcggtggctcatgcctgcaatcccagcactttgggaggccgaggcgggcagatcacctgagatcaggagttcgaggccagcctcgccaacagagtgaaaccctgtatctactaaaaatacaaaattagatgcgattggtgatgcacgcctgtaatctcagctacctgggagactgaggtaggagaatcgcttgaacccgggaggcggaggttgcagtgagctgagattgtgccactgcactccagcctggtgacagagcaagactccacctcaaaataaataaataaataaataaacaaaaaataaaaaaataaaaataaaataaaataaaggccgggcacagtggctcatgcctgtaatcccaggactttcggaggctgaggcaggtggatcacctgaggtcaggagttcaagaccagcctggctaacattgtgaaaccccgtctctactaaaaatcaaaattggccgggcatggtggctcacacctgtaatcccatccctctgggaggccgaggcgggcagatcacctgaggtcaggagttcgagaccagcctgaccaacatggagaaaacccttctctactaaaaatacaaaattagccgggcgtggtggcgcatgcctgtaacctcagctactcgggaggctgagggaggaaaatcgcttgaacctgccaggtggaggttgcagtgagccgagatcgagccattgcactccagcatgggcaacgaaagtgaaactccatctcaaaaaaaaattagctaggcgtggtggcacgtgcctgtattcccagctactcaggaggctgagacaggagaatcacttgaacctgggaagcagaggttgcagtgagccaagattgcgccattgcactccagcctgggcaacatgagcaaaactctgtctcaaaaaaataaaataaaataaaataaaaataaacaaaaacattaagctgggcgcggtggctcacacctgtaatcccagcactttgggaggctgaggtgggcagatcacctgaggtcaggcgttcaagaccagcctgaccaacatggtgaaaccccatctctactaaaatacaaaaattagctgggcatagtggcaggcgcctgtaatctcagctacttgggaggctgatgggggagaatcacttgaaaccaggaggcggaggttgcagtgagctgagatcgtgccattgcactccagcctggcaacagactgagactctgtctcaaaaaacaaaacaaaacaaaacaaaacaaaaaacaaaacaggccgggcgcggtggctcatgcctctaatcctagcactttgggaggccgaggcaggtggatcacgaggtcaggagttcgagaccatcctggccaacatggtgaaaccctgtctctactaaaatacaaaaaattagcctggtgtggtggcatgtgcctgtagtcgcagctactcaggaggctgagacaggagaatcgcttgaacccaggaggtggaggttgcagtgagctgagatcatgccattgcactccagcctgggcaacactgtgagacaccatctcaaaagaaaaaaaacattagccgggtgtggtggtgcgcgcctgtggtccctgctacttgggaggctgaggcaggaggatggctggagcccaggctgttgaggctccagcgagctgtgatcacaccactgcactccagctgggcaacagagcgagaccttgtttctaaaaaaaaaaaaaaaaaaaaaaaaaaggaaagcaaaagcaaaagcagtccacaaaagatgggctagtcaggactcttccccgcccccagggcctcaccaaggacgtagattctcccctggtggacagtgatccccagggcacttcgccggtgcttcatgggggctacgaaagtccacgtctctgtttccacatcgtagcgctccacgctgttcagctggtcctgaccatcatagcccccagcagcatagatacagttgtgcaggacgcagacgcctaaagggcaccatgcagagaaggtgactctgggggtctggctttgggaaccccagccatcacctccttgagggagacctttcctctctcctctcccttctcaccctcagaaatgaagcggggagagagagaagcttggactctatcagaatccagggcttctgtggttaccccagcatgagggttgcaacagggggtctctcccaggcctggctcagtttcaccccaggatggtagggggtgttcctgggtgctcccctccctaccgtccccacccacctgccccgcttcggatggtgttcattgctgtgatcattcgccactcgttcctctctgggtagtaacactcagctgaattaaggcggtttgtcccgtcaaagccccccacggcataaaggagacgattgaggacagccacgcccaccccgatccttcgtgtcagcattggggccaccaagtgccactcatcccgctctggctcatacctgcaagggcgtaagaaaaatggggacaatggccattatagctgaccttcgtggaatacttaagggccagatactcttttttttccttttttttttcccccttaaagagacaggttcatccggcgcgatggctcatgcctgtaatcccagcactttgggaggccgaggagggcggatcacctgagctcaggagtttgagaccagcctggccaacatggtaaaaacctgtctctactaaaagtacaaaaattagctgggtgtgatggcagatgcctgtaatcccagctactcgggaggctgaggcgagataatcacttgaacctgggaggcggaggttgcagcgagctgagatcatgccactgcactccaacctgggcaacagagcgagactccatctcaaaaaaaaaaaaagaaaaaaagagacagggtcttgctccgttgtccaggctggagtgcagtggtgcaatcactgaagcttcaaactttttttttttttttttttttgagatggagtgcaatggtgagagcatggctcactgcaacctccacctcctgggttcaagcagttattcagcctcagcctcacaagtagctgggataacaggcacccaccaccacgcccggctaatttttgtatttttagtagaaattgggtttcgccatgttggccaggctggtctcaaacacctgacctcaagtgatctgcctgcctcagctttccaaagggctgggattataggcatgagccaccacacccagcctgcagctatcaactcttgggctcaaggaaccctcctggctcagcctcctgagtagctgggactacaggtgcacaccaccgtgcccacctccactcgaactctagtgcttgcagttgttctccaaggattgaggtatcagcaactccattttccaaatgacaaaactgagcctcctagccatcaattgctcaagttcaaaaacacatctgataaacccctagtggctcagccagatcccccacttcacagataacaagataacatctcagaaaggagaaatcacacattcagcatcactctttgatgctcaaagagtcctttaggtccggcacagtggctcacacctgtaatcgcagcactttgggaggttgaggtgggagaatcccttgaggacaggagttcaagaccagcctggccaacatggtgaaaccccatctctacaaaaaatacaaaaattaaccaggcgtggtggtgggtacttgtagtcccagctaccccagggtctgaggcaggagaatcacttgaacctgggaggcgaggttgcagtgacccaagatgcactccagcctgggcaacagagcaagagagacagggtcttactctattgcccaggctagtctcctggactcaagcaatcctcccacctcagcctcccaaagtccctgattataggtatgggccacagtgcctagcccaacaatttcaaactgatggaacattttccaactccgcacaaaggaaccatatgggtttgtgacagtcccctaagcatttcccagccccaggcacagaatcaaaggtcactgactagaactctccaaggagcttagcttcatcctgaggcctccactccctgaagacaggaagaggaaacagcctcaggaagaatacccggatctcagtgtcttgggacttgccaggagcaggaccctccgagcccacccccaggccctgccactcacctctccacactgttgtggtggatgcagccgtgggagccgccgacggcatagatgtggccatcgatgacccccaccccgatgcggttacggggcacgctcatgggggcgcagggcgaccactgattggtcatggggttgtaacagtccagggcgctggagtcggtgttgccgtcgggcgagttgttcctgccgcccacggcgtacaacagcccgcccaccacgcagccggccaggccgctccgcggcacctgcaggtccgccaaccggagccaggtgccgtcactggggttgtaagcctccaggtagctgagcgactgtcggaagtagccgcccgcggtgtagatcaggcggcccaccttgggcgcccggcagggcatcacctgcgtgggcttgtgcagggtgagctcctcgaagatcttgaccaggtagtccttgcagcgggagtcggactgcaggatctcgcacttctgcagctgcatctgcaggaagttcggcgtcaacgagtggcagcgcacggcccgcagcagcgcctggacgtagaaccgtcgctgttcgcagtcgtacttgacccagttgatgcaggcgtggaagacctcggactcgcagcgcacgttcaggtcgtcccggctgatgagggtcaccagttggcagtgggacaggttgaagaactcctcttgcttggccacctgcagagggcgacagtgggacgggctgactctccagtcacccccacacctcaccaagcaggaccgggacaagtaacttatcactgccgctgacagtctcagcttccttatctgctaaatggggattcaaataataggaaccgcgtacattgtgatgactaaatgagttaatcctgccgggcgcggtggctcacgcctgtaatgccagcactttgggaggccgaggctggcggatcacgaggtcaggagttgagagacaagcctggccaatatggtgaaaccccatctctactaaaaatacaaaaattacccgggtgtggtggcacacgcctctagtcccagctactcgggaggctgaagcagaagaatcgcttgaacccgggaggcgggaggcggaggttgcagtgagccgatattgcgccactgcactccagcctgggcgacagagcaagactctgtctcaaagaaaaaaaaaaaagagttaatactatgtgccaagtatgtcatcaggactcaggaaaatgggcaaagactcagtagatcgtgtaccctggggtatcatttggctttggtttttgagacagagtctcactctgtcacccaggctggagtgcagtggcatgatctaggctcactgcaacctctgcctcccaggttcaagcaattctcctgcctcagcctctcaagtagctgacattacaggcacctaccaccatgccccgttaatttttattttattttattttattttgatatggattcttactctgttgcccaagctggagtgcagtggtgtgatcttgcttcactgcaacctccgccacccaggttcaagtgattctcctgcctcagcctcccaagtagctaggattacaggagtgtgcctccagagcagctaattttttttttttttttggagacagtcttgctctgtcgcccaggctggagtgcagtggagcgatctccgcttgctgcaacctccgcctcctgggttcacgccattctcctgcctcagcctcccgattagctgggactacaggcgcccgcgaccacgcccagctaagtttttttgtatttttttagtagagatggggtttcaccgtgttagccaggatggtctcgatctcctgaccttgtgatccacccgccttagcctcccaaagtgctgggattacaggcgtgagccaccgcgcccggccatttttttgtatttatttttagtagagacggagtttcactatgtatttttagtagagatggcatttcttcatgttggccaggctggtctcaaactcttttttttttttttttttttttgagatggagtctcgctcttttgcccaggccggactgcagtggcgctatctcggctcactgcaagctccacctcccgggttcacgccattctcctgcctcagcctcccgagtagctgggactacaggggcccaccaccgtgcctggctaatattttttgtatttttagtagagacggggtgactgtgttagccaggatgatcttgatctcctgacctcgtgatccgcccgcctcggcctcccaaagtgctgggattacaagcgtgagccacctcgcctggccagtcttgaactcttgaccttaggtgatctgcccatctcagcctccctaagtgctaggattacaggcgtgagccaccggacctggcctgtttttgcttttgagacacagttttgctctgtcacctaggctgtagtgcagtggcacaatcatagctcactgtagccttgaactcctgggctcaaacgatcttcccacctcagcctcctgagtcgctgggactacaggtgtgtgccaccacgcacagctaattttcatatttttatggtagagacggggtttcaccatgttggccaggttggtctggaactcctgacctcaagtggcccacccccttgccttccaaagtgctgggattacaggcatgagccaccgtgtccggccgttggtcttaaactcttgagctcaaatgattctcctacttcagcctcctgaggattacaggtgtgcatcaccatacctggcttggctttttttttttttttttttttgagatggagtctcgctctgtcgcccaggctggagtgcaggggtgcaatctcggctcactgcaagctccacctcccgggttcacgccattctcctgcctcagcctcccgagtagctgggactacaggcgcccaccaccacacccggctaatttttgtttttgtatttttagtagagacgggatttcaccgtgttaaccaggctggtcttgaactcctgacctcaggtgatctgcctgcctcggcctcccaaagtgctgggattacaggcctgagccaccgcgcctggcctctgagttttctgtttgtttcttttttttttttttttgagatggagtctcgctctgtcgcccaggctggagtgcagtggcacgatcttgcctcactgcaagctctgccatccaggttcatgcgattctcctgcctcagcctccgagtagctgggactacaggtgcccaccaccatatccagctaattttttgtatttttagtagagacggggtttcaccatgttagctaggatggtctcgatctcctgacctcgtgatccgcctgcctcagcctcccaaagtgctgggattacaggcgtgagccaacgcgcccggcctcttttgtttcttttttttttttgagacagagtctcactctgtcgtcaggctggatacagtggcgtgatctcggctcactgcaacctctgtctccgggttcaaatgattcttctgcctcagcctcagcctcctgagtagctgggactacaggcacgcacaaccacacccggctaatttttgtatttttagtagagatgggatgtctgagtttattttttaagagacagggtcttgctctgtcacctatggtggagtgcagaggtgccactgtaacctcaaattcctgggctcatgtgattctcctgcctcagcctcccaaagcactgagattatacgcacgagccaactcacccatcttgttttttaaaatgaaatcattttctaaaatggcaaatagactaaaaaaggaaaaaataagcaatcacaatagaatgttgtggaaaaaaacaagtgacagctctgggccagcacagtggttcccacctgtaatcccagcactttgggaggccaaagcaggcggatcacctgaggtcagaagtccgagaccagcctggccaacacggtgaaaccccgtctctactaaaaacaaaaaaattagccagctgtggtggtgggcacctgtaatcccagttactgaggaggctgaggcaggaaaatcgcttgaatccaggaggcagagattgcagtgagctgagattgtgccactgtactccagcctgagcaacagagtgagactccatctccaaaaaaaaaaaaagtggaagctccgaagaaaccagcatgagttggaattttgatccgaccacttcgtaggtgtgtaacttgggcaaatctctgaaatgctccatgtcttggttttcctcctctgtaaaatgggattatattaatggccacctcaaagtaaggctacttctagggtatacagagccctggataaatatttcttgtagccaggtgtggtggctcacgcctgtaatcctggtactttgggagaccaaggcgggaagattgcttgagcccaggagtttaagaccagcctgggcaacatagcgagacctcatctctaccaagaaaagatataaaaattagccaagcatggtagctcacgcctgtagtctcagctactcaggagactgaggtgggaggatcacttgagcccaggagctggagtttgtgataagcagagatcgtgccactgaagtccagcctgggtgacagagtgagaccctgtctctaaaaaaagaaaaaaaaaaaaaaaaggccaggtgcggtggctcacacacgtaatcccagcactttgggatgccaagtcgggcggatcacttgaggtcaggagttcaagaccagcctgaccaacatggtgaaaccccatctctacaaaaaatacaaaaattatctgggcatggtgacacatgcctataatcccagctacttgggaggctgaggaatgagaatcacttgaacccgagaggcggaggttgcagtgagccgagatcatgccactatactccagcctgatgacagagtgagactctgtcccccacccccaaaaaaaaaaaaaagggggcttggcgtggtggctcaagcctgtaatcccaacactttgggaggctgaggtgggcggatcacgtgaggtaaggagttccagaccagcctggccaacatggtgaaaccctgtctctactaaaaatacaaaaattagccagcgtggtggtgcacccctgtaatcccagctacttcggaggctgaggcatgagaatcgcttgaacccaggacatggaggcttgcagtgagccgaaatcttgccactgcacttcagcctgggcgatagagccagactcagtctcaaaaacaaaaaaggactgggcggtggggggcgggcgtgggcgcagtgtctcatgcctgtaatcccagcacagttagggaggccaaggcaggcagatcacctgagctcaggggttcgagaccagcctggccaacatggtgaaaccccatctgtactaaaaatattttttaaaaattagctgggcatagtggtaggcacctgtaatcccagctacttgggaggctgaggcaggagaattgcttgaacccaggagatggaggttgcagtgagccgatacagtgccactgcatgccagcctgggtgacagagtgagactccgtctcaaaaaaaaaaaaaaaagttgtcaggcactcgtctatgtaatcagttttaatctagtaccccatgttcatacaaacacaagaaagaaacactgtatatgtttctcctactgtatagaccactttcctagaagctgcaggccctaggactaacgccagagaaccctggggcgtctgatcaaccccacatgtaacatagagggtaggaaagaatctatccctgaaggagagaaatagagatcagtgtaacatccatcccagctggtaccagccagtgggggacttagaaaatttccaggaaggaacaccaagacatgggactcccgaaggcttagggcctggggcactgccctgcttgcctaggctgaagggtagtactgcctcataggacagttgggaacagtcaatgatgcaaaggacataaatcacttagaacaggggctggcccacagcaagtgctcaataaacacttcttggcctggtgttggtatggtgcttcatacctgtaatcccaacactacgggaggccaaagccagaggattgttcaaagccaggaggttcgagaccagtctcagcaacatagcaagaccctgtctctacaaaaaaatttaaaaactaaaaaattagccatgcgtggtgctgcatacctatagtcccagctactcaggaggctgagataggaggcctccttgagcccaagagttggaggctacagtgagctatgatggcaccactgtattccagcctggggacagagcaagacctcatctcttcaaaaactttttcttttttttttgagacagagtttcgctcttattgcccaggctggagtgcaatggcgcaatctcagctcactgcaacctccgcctcccgggttcaagcgattctcctgcctcagcctcctgagtagctgggattacaagcatgagccaccatgccaggctaattttgcatttttaatagagacgtggtttctccatgttggtcaggctggtcttgaactcccgaccgcaggtgatctgcccaccttggccttccaaagtgctgggattataggcatgagccaccgcgcccaggcttttttttttttttttttgagacagagtcttgctctgtcgcccaggctggagtgcaatggtgcgatctcggctcactgcaacctccacctccccggttcaagcgattctcctgtctcagcctctcgagtagcagggactatagtcacatgccactacacccggctagttttctttttttgtatttttattagagatggggtttcaccatattggtcaggctggtctcaaactcctgacctcaggtgagccacccgcctcagcctcccaaagtgctgggattacaggcgtgagccactgggccctgccctctcttgtcaatttctatagataatttccttcactgagaaatgtgaaaacgaaaccaaaaacagtataaggacattgtgtggaccaaagaaaacatgactaaggttcagacttacagcttgcagcctgtcacgggtgtccaataaacatttgctgactgcccgaaaggctgggctaccctaggatttggctgctgttcactgcactctgccccactttgaccccagagaaaccagggagcccagagacatatgaagacctcaccttccccagctgttcaccagtctccccacatgtgtagacaaggaactcagaaccccagttgttttttaattttttttttttttgaaactgagtcttgctctgttgcgcaagctggagtgcagtggctcgatctccactcactgcaacctccacctcttggttcaagcgattctcctgcctcagcctcctgagcagctgggactacaggcgcccgccaccaggcctggctaatttttatatttttagtagagatgggttttagctatgtgggccaggctggtcttgaactccttacctcaggtgatccacctgcctcggcctcccaaagtgttgggattacaggcatgagccaccacgcccggccccagttgttttttgtttgtgtgtttgtttgtttagagacagggtgtcattatgttgcctgggctggtcttgaactcttggcctgaagcaatccccccgcctcagcccctcaaactgtggagactacaccaccatacccagcccagaacctcctttttctccagtttcctgccttgacatctcaaggggagacagtgatgagcactcgtccatccctggtccttctcctgacactgcccccagccccacttccccgctcacctccccaaaatgcatgtagatgtactcccgggcacgctggtgcaactccacacagccaatctgctcagcgaagttggcgatgccgatggcattgctggggtccagctgctgcaccaggaagtcactgcaggcacggacaacgctgtcgatctggtacatgacagcaccgttcatgacgtggaggacacacttctcgcccatggagatggaggccgtgtaggcgaattcaatgaggcgctccatgaccttggggtggataccctcaatggacaccacctccatgccctgctcccgcagcccgttggtgaacatggccttgaagacagggctggatgaggccagcaccaccttgtgggccatgaactgggcggccggtgcatcctggtacttgacctgcagtgtgacgtcacacagctgctggctgagccgcagctcgttcatgatgccaaaggcctgcttggtatgatcctccagggtgtagctgaaggtgcggttgccatgctgggagggcgtcacctccgccttgcactcagtggaggcgtacatcaccgcgtcccctgccccctcagggcactgtgactgcaggggcaggaatcggcagcaggccccagccccgctaggcctgggatctggctgcatggggttccagaagataagcaacaccaccacctctggcactcagggacctggaggggagagagcacagggcagagggcaggggttgggactgggccagcacctgccgggcctcgttttgcaagataaagcaattcctaggtcagttttcctgcaaagtaggtgaagcagaatccatttgcaaacttgcaaacttccccgacctgatcaacctgattggcccaagagcccatcttaaaacatacatgaagtcatgtctctcccctgctctggatcctccaatgcctcccacagtacctagtaaaactgaactcctcaacagcctgcaaagccctacgcaattagcccctgccacctcttccctttgatcactctgcttcagcaatctggcggcctttccctttctagagcatgttgagctcattccttcatttgcctcaccatttactgggcacctactgtatgccaggcactgatctgggtgctgaagacacagcagtgagcaaaatacaaaaatcctaccctgccagagctgacaactgcagggaggagcaatcataaactaaaataagcaagacctggaaaaacagcttcatgaagaaaattacaacagcattgtgacaacgtgagaatcgggtgcagtttgtttgcttttttttttttttttttcagatggagtctctctgtcacccaggctggagtgcaatggctcgatcttggctcactgcaacctccgcctcccgggttcaagcgatcctcctgcctcagcctcccgagtagctgggactacaggcgtccgccaccacacccggctagtttttgtatttttagcagagactgggtttcgccatgttggccaggctggtctcaaactcctgacctcaagtgagccgcccgccttggcatcccgaagtgctgggattacaggcgtaagccaccatgcctgacccggggtgcagttttttaaaatctggcagaccaagcctctttgagaaggtgaggttggagctgagacaaggatgaaaattattataaagtgggaggctggggagtagttttccaggcagaggaaacagtaagtgcagtggctcagaggctgagacagtcaatctggagaattgggaaggagtgcagtgagagctaaggacttaaggaagggtttcatggaaacccctggatcctggagggccaggagatgagttatgtgttttgtgttttgtttttcgagacagagtctcgctctgttgcccaggctggagtacagtggtgcgatcttggctcactgcaacctctgcctcccgagttcaagatattctcgaccgggcgtggtggctcacgcctgtaatcccagcactttgggaggccgaggcaggcggatcacaaggtcagaagatcgagaccatcctggctaacatggtgaaaccccatctctactaaaaatacaaaaaaattagccgggtgtggcggcgggcgcctgtagtcccagctacatgggaggctgaggcgggagaaaggcgtgaacccaggaagcagagcttgcagtgagccgagatcgcaccactgcattccagcctgggtgacagaacaagactccatctcaaataaaacaaaaaaaagatattctcatacttcggcctcctgagtagctgggattacaggcaccagccaccacgatgggctaattttttgtatttttagtagagatgggatttcaccatgttggccagggtggtctcaacctcctggcctcaagtgatccccctcctcgacctcccaaaatgctgggattacaggcataggctgctgtgcccagacgtgagttacgtttcaaaaggagtgggggatctccaagtggctccccacaagtggatctgcaagttctcactcccctctttctgggactcaactcaaagtctcctcttccctgttttattgtcatcactgcgcttgtcaggaactgaaatgacctcctttgcttgtctgttgatcgactgtctctcgtccccggccccagcgcctcaaatggcagggagacctatgtaggtcggcgtcgggccaaccctctcctgtgcctctcgcctggggcctggcactgcgcaggggtcaataaacgggtggttggctaactgccctgccaccgtgcctgccagagcggcctcctccaccctccctgggtgccactcggcccccactctggtgccaaggccctgggtttgcctcttggtctttggccaatcggtcaacaatgccccttgggcaccgggcacttcccccaccctacaaagcggcaagtgggcgactgcgcatgcccctcctgagcctccaccaggcccagtgaggcgaggaagtgaccccaccgcggcctctcggctgccaaccccagaacgcagatcgagcccctcaacgcctcggagcccccgggcctccttctgcgcagcgcctcctggttctctcgctcggtttccgccgctcccgggccaccccaagagttgcgccgtccaacaaaaatatccacccaggtcgcgccctcctggccctccgagtcctggcggggaactcggaggcgccctgggccgtggcgcccgttttcctggtctccgggcacggccgcaggggcgctcgcggcccgcgatgcccgcagcccgggcacatcccgcctcactcaccccgccatggccgcgctccggctccgcctccaccgcccgagccccggcgcctccatcgctgcgcgtgggggaggcgcggagcgcgcgcaggtcaccatgactaagcagagccgggcgcccgccgtgtcacaataaaagtccccgggccctggcctcaggcggtagggaccgctgaggggccgctccccacccccgcccacgcctgctgtcgcccagctgcgcggccaccacggcgcccagcatggcggcggggcgggggcacgcgaccctgagcgcgcttagccgcgtggtccgagtcgcggggagtctgaaccccgagttccaggcctgcgcgccccggcccgcaccaggggtggggtggacacccctccccgtcgctgctgcccaagcgctcacctcagcccccaggtcgcctccgtagggggtccctcggggtggggatggccggggcgcgcaggggctccgggcacagtgatgccacccgcgcactgcgcttccgggaagccgggggaccgcgacccagtccaggagattcctgccttaccttggctgtaggggacccgcgggcgcctccgccgtcggggggcctcggctccagggctgcgtggcctgcggggtcttggttgtcggttggggagcggcctcgggacgcccgaaaaggaggcggggagagggcggaaagggcgcggcgggaaaggagcggcgattctcccgcccttcccgcaggtgcccggcgcccgtcggcgaggagtggggcatcgggcgggggcgcacagccaggccccccttctcactgtcccttccatctcccgatttcgttgctggatgtctcctcgcggggctgcgcgccaccatctgctattctccttttaacaacgcacagcgccggcctcgtggtccggcggccgcaggatctagggaaaattatctacctcgctaggttttcttttcttttcttttctttctttctttctttttttttttcctttagagacaaggtctcgctctgatctgcacgcccaggctggagtgcagtggcgcaatcgcggctcactgcagccttgagctcctggcctcaagcgatcctcccacctcagcctcctgagtagctgggaccacagacaggcgccaccacacccggctaatttttagtttttgtttgtttgtttgtttttctgtagagatggggtctcgcaatgttgcccaggctggtcttgaacacctgggtttaagagatcctgactccattggcctcccaaagttctgggattataggtgtgaggcgctgtgcccaggcctcaggttttccttgtcttttttttttttttttttttttaattgagacagagtctctcactgtcacctgggctggagtgcagtagctcgatcttggctcactgcaacctccgcctcccgggttcaaaaaattctgcctcagcctcccgagtagctgggattacaggcgcccgccatcatacccagctaattttttgtatttttagtacagatggggtttcaccatgttggccaggatggtctcaaacccctgacctcatgatccgcccgcctcggcctcccaaagtgttgggattacaggcgtgagccaccgcgcccggccttccttgtctttatttttgatttacttcctatcaagaggcgtgtggcacccgtctttggggggttcaaaccctggatctgcctcttaccagctcagtgcccgtgggcgcttacttagttctctatggttcagtttcctctctataaaaagtaataatataatagcacctacctaccagattatcattaagactaaatgcggggccgggcgcggtgactcacacctgtaatcccagcattttgggaggccgaggcaggcggatcacgaggtcgggagatcgagaccatcctggctaacatgataaaaccccgtctctactaaaaatacaaaaaattagccgggcgtggtggcgggcgcctgtagtcccaggtacacaggaggctgaggcaggagaatggcgtgaacccgggaggcggagcgtgcagtgagccaagatcaccgcactgcactccagcctgcgccacagagcgaggctctgactcaaaaaaataaataagtaaataaaaaataaaaatattaaatgcgaatgctggctcccaagagacagaaaccattgctatttttcatgactggggatactgatttgtcatgcacaccgtttatcatgtaacgttaacttttaaataaatgtatgtaagtttattttaaagaattcatctaggctgggtgcggtggctcacatctgtaatcccagcactttgggagccgaggtgggtggatcacgagatcaggagttcaagaccagcctggccaacatggtgaaacccccatctctactaaaaatacaaaaattaaccgggcgtggtggcgggcgcctgtaatccccagctactcgggaggctgaggcagagaattgcttgaacccgggaggcagaggttgcagtgagcagagatcgcgccaccacactccagcctgtgcaacagagtgagactctgtctcaaaaaaaaaaaaaaaaaaagaaaaaaaaagaattcatctaaatttcatccaaattataattatttttaaaagatagagaggccaggcgcagtggctcatgcttgtaatcctagcactttggtaggccaagacgggtggatcacctgaggttaggagttcgagaccggcctgaccaatatggtgagaccgccgtctctactaaatacaaaaaattaaccgggtgtggtggtgggtaagtgaaggttgcagtgagccgaaatcctgccattgcactccagcctgagcaacagcgcgagactacgtctcgaaaggaaaagaaaaaaaaaaaagatagatgggatttcgccatgtaagtgaataataaatggaaactctaggcccctggagcctccagggtgaatttgaaagattgaacgtcctggctcagggtctggaaggaatcacgtgtagggctacgttggagttaccccgctaccccaaatccttgttgcgtgtagatgcagttccagacagctcctcaggggggcggcctagatagtccgtgaacacgctgagtggccgaggttgtaaccagcgccttcctggcacgttgcagaaaacaacctctctaatatctctcaaaatcaaacctacaggtccagtgagccaggtgcttgtagagatttatccaaggtgcactcgcacacatacaggaggaagcatgtgcacacattcattgcattataatgcatatcatggcaaaaggactggatcccattcacatgtccctctgtagagccctggcttaatcagtggtggcacatccttgctaagaaatactatgcagccagttaaaaggagcagtacatttactgtatggatatgtacctagatcttctattttttcttttctctttttctttttcgattttcatttatttatttatttatttatttatttatttttgagacggagtctcgcactgtcacccgggttggtgtgcagtggtgtgatcttggcttgctgcaacctctgcatcccgggttcaagcgattcttctacctcagcctcccaagtagctaggattacaggtgcctgccaccatacccagctaattttttgtatttttagtacagacagcgtttcatcatgttggtcaggctggtcttgaactcctgacctcgtgatcctcccgcctcgtcttcccaaagtgctgggattaccgacgtgagccactgcacccagactctttttttattttatttatttatttttctttttttgagacaaggtcttgctctgtcacccaggctggagtgcggtggcacaatcatagctcacttcagccttgacctcctgagatcaagtgatcctgctgccccagcctcccaagtagctgggactacagtcactcactaccacacccagctaacttccccccaccctttttttctttcttttgtagagctggggcttcaccatgttgcccaggctgatctcgaactcctgggctcgacggatcctccctacttggtctcccagagttctgggattacaggtgtaagccaccacgccccacctctttttttttttttttttttttaacagggtcttgctgtcacccaggatggcgtgcagcagtgcaatcatggctcactgcagcctcgaactcctggctcaagccatcctcctgcctcagcctcccaagtagctgggaccacaggtgtatgccaccacacttggctaagttatttcttttttgtagagatggtgtctcactatgttgcccaggttggtctcaaactcctgggctcaagtgatcctcctgcttcagccctgcaaagtgctgagattacaggcataagtcactgtacctgaccaggcctctatttttttaatgtaaaaaaagagccaggcccagtggcttacgcctgtcatcccagcactttggggggccgaggcgggcagatcacctgaggtcaggtgttcgagaccagcctgaccaacacagtgaaacctcgtctctactaaaaatacaaaataagccaggtgtagtggcgcatacctgtaatcccagctactcaggaggctgaggcaggagaatcacttgaaccccggaggtggaggttgtggtgagctgagatcgtgccactgcactccagcctgtgcaacaagagcaaaactgcatctcaaaaaaagaagtgctatggaccaaattatgcacccgtacccccttttcgtgtgttgcagccctaaccctcaatggaatggtatttggagatggggcctttgggaagcgattaggtctagatgaggtcatgaaggtgggaacctcatgatgggattagtgtctttataggaagagcacaccagaaagtgttctctctttcttttttcttttcttttttttttttttttttttttttgagacaggctggaatgcagtggtgccatctccactcactacaacctccgccttacaggttcaagcaattctcctgcctcagcctcctgagtagctggagttacagatgtgtgccaccacacccagctgatttttgtatttttagtagagatggggtttcaccatgttggccaggctgatcttgaactcctggcctcagttgatccacctgcctcagtctcccaaagtgttgggattatagtcatgagctacctcgcccgacctgctctctgtttctttccccaacatgtgggaacacagtgagaaagcggctgtctgcaagctcagaagagagtcctcactagaacacaaccatgctgacattctctttttttgagaccatgtctcgccctgtcgcccaggctggagtgcagtggagtgatctccgctcactgcaacccctgactcctgggttcaagcgattcttctgccccagcctccggagtagctgggattacatgcgcatgccgccacacccaggtaattttttgtatctttagtagcaacggggtttcaccatgttggccatgctggtctcagattcctgacctcgtgatccacctgcttcggcctcagtgctgagattacaggcgcgagccactgctcctggcctttttttttttttttttttttttttttttccgagacagagtctcgctctgtaatccaggctgaagtgcaatgtcgcgatctcagctcactgcaacctccaccttctgagttcaagcagttctcctgccttagcctccccagtagctgggattacaggcacctgccaccacgcctagctaattttttttttgtatttttggtagagacagctgtttcaccgtgttggccaggctgttctcgaactcctgatctcaggtgatccgcctgcctgggcctcccaaagtgctgggattacaggcgtgagccacagtgtccggccccaggctgccattctgatattggacttcctaccctccagaacgatgcaaaagtaattactgggacttaagccaccccatctagggtatttgttatgcagtccaagctgactaagagcaagacattacaaaatgtgtgggtattgccaggcgctgtggctcatgtctgtaatcccagcacttgggaggccgaggcaggtgaatcacttgagctcaggagtttgagaccagcctcaaaaaaaaaaaaattagctgtgtgtggttgtgagctgtgttgtggttttgagctctgtggttgtgagccaggtgtggtgtggggatatttggtcccagctactacacgggaggctgaggcaggagtagtattgcttgagcctgagaggtggaggctgcagtgggccataattgtgtcaaatgcactccagcctgggcaacacagcaagaccctatctcaaaaaccaaacaaacaagaaaatgtgtgggtgtgcaatatttttgcaagatatacttttcaaaaaaattttttagacaggtcttgctgtatcacccaggctggagtgcaattgtacaatcatagctcactgcagccttgacctcccaggctcaggcgatcctcccactccagcctccccagtgtctgggaccataggcatgtgccactgtgcccgggtgattttttttttttttttagatagtgtctcactctgttactcagattggagtgcagtggcatgatctcggctccctgcaacctctacttcctgggttcaagcaattctcatgcctcagcctcctgagtagctgggattacaggaacctgccacaacgcctggctattttttgcatttttagtagagacggggtttcaccatgttggctaggcttgtatctaactcctggcctcaagtaatcctcccgccttggcctcccaaagtgctgggattacaggcatgagccaccatgcccggcccacctgggtgatttttgaatcatttctagaaactgggtctccctatgttgtgtgggcctatctccaactactgggctcaaatgatccttctgcctcagcctcccaaaatgctaggattacaggcgtgagccaacatgccctgccaagatatactgttaagtcaacaaagcaacatgcagaacagtgataaatttgtacaaaaagacaggaggtgtatttacatttcattttggcaaggtgaatccacagactagctctggaaggtccccaggagtcccactgtgatcgccacaaggaaggggaactgcgtgcttttttttttttcttgagatggagtttcattctttttgccgaggctgaagagcaatggcatgagctcggctcactgcaacctctgcctcttgggttcacgtgattctcctgccttggcctcccaagtagctgggattacgggtgcacgccaccatgcccggctaattttgtattttaagtagagacggggtttccccatgatggccagactggtctcaaactcctgacctcaggtgatccgcccgcctcggcctcccaaagtgctgggattacaggtatgagtccactgcgcctggctgaactggatgctttttaaattttctagaaaactcataagcaagtgtgcctgtgttccaactggttggtttcccgtgtgtgtggcctccaggggcactctgaacgtggccagcagggacttggggtccccccagtctgggacacctgtccccaaaacaccgctttttttgaggttgcctgcagttccaaggtttcccggaaggtggagcgctgcagtctgaacccgaagccagacgccccccaacccggccccagggcccatccagccgttcaggggtcaagaatgcgcctggggacatgccgggggcaggggccagcacgtctggagccttttatgggcacaaacggcgccctggcatcgttccaaccatgaatgcagacccccgtgggagggactgttggcatagccttgccagacccatctggaggggtcagataccaagccagtgcctcctggggcctgaagcttaagctaatgtcctggctcagacactgagacaaggtagtcactgtctggaatttcctcatctgtctaatggggattaggaaacctaccttgcaaagttgctataaggctgaaaaataggtgtgtcccagaactgtgcagaaaactagccagacaaaatgaactcttactttaggccgggtgtggaggctcacacctgtatcccagcacttcgttgttgttgttgttgttgttattgttattttgttttctgagatggagtcttgctcggtcgcccaggctggagtgcagtggcgcgatctcaacttactgcaacctccagcctcctgggttcaagtgattctccctcctcagcctcccgagtagctcggactacaggcgcgcggcaccatgcccggctaatttttttttttttttttgtatttttattagaggcggagtttcaccatgttggccaggctggtctcgagctcctgacctctagagatccgcctgcctcggcttcccaaagtgctgggattacaggtgtgagtcaccgtgcctggcctttatcccagcactttgggaggccaaggtgggttgcttgagcccaggagtttgagaccagcctgggcaacgtggtgagaaatcatctctaaaaaaaaattcaaaacatgtttggtgtggtgctccagtagccccagctactcgggttgggggctgaggcaagaggatcacttgagcacaggagttcaggaggatcacttgaggctgcagtgagctgggattatgccagtgtactccaggctgggcgacagagcaagatcctatctcaaaaagaaaccaaaaaacggccgggcacagtggctctacctgtaatcccagcactttgggaggctgaggcgggcagatcacgaggtcaggagtttaagaccagcctgatcaatatgtgaaaccccatctctactaaaaatacaaaaactagccaggtgtggtggcggtgcctgtaatcccagctactcgggaggctgaggcaggagaatcgcctgaacccaggaggcggaggttgtagtgagccaagattgcagcactgcactccagcctggtgacggagtgagacttcatctcaaaaaaaaaaaaaaggccaggcgcagtggctcacacctgttatcccagcactttgggaggccgaggtgggcggatcacaaggtcaggagatcaagaccatcctggctaacactgtgaaaccccatctctactaaaaatacaaaaaaattagccatgcttggtggcgggcacctgtagtcccagctacttgggaagctgaggcaggagaatggcgtgaacctgggaggtggagcttacagtgagccgagattgcgccactgcactccagcctgggtgatagagtgagcctccatctcaaaaaaaaaaaaaaaagagaaaccaaaaaacctcttatgttttcctaaaagacatgatttcatcacacaggctggagttcagttatgcaaaaatagctcactgcagcccctgagctcctgggttctggaaatcctccttcttcagcctccccagtagctgtgactataggcatgcgtaaccacaactgcctaatttttaaaattttttgtagagatggggtctcactatgttgaccaggctggtctcaaactcccagcctcaatcgatccttctgcctcagcctcccaaagtgttgggattacaggcatgagccactgtgtctggccttattttgttatccttttttttttttttttttttttagaccgagtctcactttgttacccaggctggagtgcagctctttgcaacctccgcctcccagtttcaagggattctcctgcctcagcctcccgagtagctggaactatatgcgtaagccatcacacttggctaattttggtatttttagtagagatggggtttcaccatgttggccaaactggtctcaaactcctgacatcaggtgatctgcccacctctgcctcccaaagtgctggggttagaggcatgagtcacggcacccagcctattattattatttcttttaatgaaggatctgaaactgcatttgaagaaattttattaactgggcatggtggtgcatgcctgtagtcccagctactagggaggctgaagcaggaactccaggcttgatcccaggagttccaggctgcagtgagctataattgtgcccattgcactccagcctgggtgacagagcacaagatcccaactcaaaaaaaaaaaaaagaaagaaagaaagaaaagaaaaataaaaaagaaattttattaccagataggatttggctgagtctcccagagtcaaatttgggggtgccccacccttggcattgtccttgataactttattccactcttacactcaattcctcagtaattctgtctgctgcctctaaaatctatctagaatccacggggtctgggcttagctggaatctccatcattgttcctgtggctcagtgcagccccccttcaccttctctggttttcaacctcccatggaggccacaagacacctgtgatcacctgaattagggcaagtccctcttctgcttagaagcttctatggctcccacctcactcagagcaaaagcgaagtcctctatatcacccacaaggtccttcgggaactactccttcagctccttgtctcctcccattctccccctccgtccctgctccaggcacaccagcatcgctgcatttcttagaacacatgggcacatttcagcctcagggcctttgcgcatgccattccctcatcctgaaatgcttttcttttggtcttcccaggacagaggtctcagctcacatcacaagtcactacctctgcagagaggtcttccctgaccaccatcaccatctctgtcgtttgtcactggaatcatctccattatttcatcaccgagttcttttctgtgttcccaagcagaacgtcaattccacgagggcacagattttttgtctgtttgttcacattgtggggtgtcgctgcataaatacatttcccctgcatcttttccgactgcacctttggctgcatttcctacaaattcctttatgtaaaaagaacaagtctgtaaaacttgggaagacagtcgtgggccgagggtgtcagtctgcagccggttctgataccagagtccgggcggctgtgggtgcaccggggctgcctgtggagccgctggtgtccagcccgtcgcgctggggcgatgagcgctccgagccgctgaagctcccatcaaggcccgggggcaggcagcggcgcaggcccccggaagcctcagccgcgctcgccgactgctgggagccactcgggtctctgccgcaggagtggcgtccgcagcagaccaggcgcaggagcgcgtggcgcaggtcgcggttggtgagcgtgtagatgatggggttcagaagtgagttggccatggccagtcccaggaagggatcggcctgcaggagtacaggacaggtgcgcgccgggcacgccacgtcgagcaacagcagcaggaagagggggccccaacatgccacaaaggccaggagcaccacgctgagcgtgcgcagcaaggccagcgagcgcggcttgcgacgcgcccgggtcgaggtggtccccgcagtcccgggccgtgccggcaggcgccgcgcgttggcgcgtacctggcagtagatgcgcgcgtagagtgcacagatagcggccaggatgcccacgaaggcgagcacgcagaagagcacgtaggccttggcgtagagcggcaagacagtggagcaagcgtccaggcgacccaggcaattccagcccagcgctggcaggagcccgaggagcagcgacacgccccaggccgcggctgccatcgccagcgtgcgcccccgactggagacgggcgcgggccccctgcgcgccatggtgaggctgcgctccagcgcgatggccaggaggctcagcacggacgcagtgagtgccacgaagacgcctccctcccgtgcgaaccagagcgcgggggacagtttcagcgtgagcggccccgacagtaggatgttggcggcgtaggcggcgcctgccagcagatccgacaacgtgaggctgcccaggagcaggaacatgggagcgtggaagcgcgggtggcgtccgagcaccaacaacacggctagattctctagcacgatgaaggcgcacaccgccaggcacaccacggcgtcggcgcgcaggccggcacccggctggtagcgcgcaccgcggagcttgccggtgtagttgtaatgcaggacgatgacctcgctcaccggcgccggccgcagcagccccgactccatgggccgcgcgccccaaggctgttggagaggcaagatacggtgtcaggccgcggtccccgtaagcacgctcgcagcagccggctaagtcgtgggaaaggggccctacccactgaccatcaccccctatacatggtgtccaagggggagttcaggatggagggatagagtccgtggagacagacatacacacaaataatatcacgagggaacaaggtgacatagtcccaaaaaaagggacattaataacacatgaatggctgggcgcggtggttcacacatggctgggcgcggtggctcaggcctgtaatccccgcctgtaatccccccaggctcaggcctgaggcagtggctcaggcctgggaggccaaggggggcagatcacgaggtcaggagatcgagaccatcctggctaacacggtgaacccctccgtctctgctaaaaacacaaaaaattagccaggcatggtggcacgtgcctgtagtcccagctactccagaggctgaggcagaagaatcatttgaacccaggaggcggaggttgcagtgagccgagatcgcatcactgcactccaacctaggtggcagagcgagactctgtctcaaaacaccccccctccccaccaaacacacacacggctgggtgtggtggctcactcctgtaattccagcactttgggaggctgaggcgggaggattgtttgaggcccaggagttcgagattagcctggacaacataggagaaccccgtttctacaaaaattagccgggacgtgttggtgtatgcctatagtccaagctactcagtggagtcccagctgaggtgagaggatcacttgagcccgcggggtcaaggctgcagtcagtgagcattgattgtgccactgtactccagccaggacaacagagcaagactttgtctcaaacacacacacacaaacacacaagcagggagttccagagacgtaacagtaaacacacagaacgcacacaaacgcaacacacacagaaagagacacacaaatacagcgacacactacaagggcaaaacacacagtcacacactatcagggaaactaaaaaatacatcatacaggaacagagtgacgcaggcagaaaaacacagcgaccaaaattcagtcacacgaatacagggtctcccacccagtggcacaggccacaatttcacaacctccactcacactagcctggggcccagtgcaccacactccacactcttgtctcactgcatacaaagctttttcctgccaaaaccccctcatccacccaaaaccccatgagaaagttgctccttggccaggcacagtggctttcgcctgtaatcccagcactttgggaggccgaggtgggagtatcacttgagcccaggagttcgacaccagcttgggcaacatactaagacttcatctctacaaaaaaatttaaaaattagccaggtgtggtgttatgcccctatagtcccagctactcaagagactgaggcgggaggatcacttgagcctgggaggccgaggctgcagtgagccatgatcgcacccctgctctccagcctgggtgacaagagagaaactccgtctcaaaaaaaaaaaaaaaaaaaaaagttgatcctattcactcattttactaaggcagagcctgaggacaggagagagaatccacaagaggcaaacagactcttacagaggggcacacatgtcattaaactgtaataacactcctcacctgcctctgtgaccttattaatccccacttcctttagtcctaatttacagatgagaaaactgaagctcaaaagaaatgcttcgtatcgaagcaggcgcaaaggtttccatgctcccacacaaacatccatgcacaaatagtccccatgcaagtccagatgagaaagccaaggcctggggaggggaatggatctcttttgcacaaggcagggatgcggacatcccagagagcttcagtcacacacagagaatcaaggcaggcaaacatagacaggaagtcgctggctcacccatgctggaggtggggagcccaaatacagggagacagggttacacatgctctgagggggaggccaaccccatccgcccagcttgcccggcagcaggactgaagtatggaaacttgcagtggcccggccaggagggggtggccaggggattccagccaccttcaccccgtatcccaggtcctgcacccagctggggagcccccagcttccccctccccagaggcctccaggaaaagttcggagaactccctgcaaggagtggtgcgcctttttagaccgggaaagtggccgccagggcgaccccctccgggtcaggcccagcccagcgcccccaaaggtccagtgcagtccactcactctgcgccctggtcgtgcgccacccgcagtcgcgctgccttgaaccgagtgagcggacgccgctccgggggcggggctggagctggcaggcgagggggcgggccagcgacgcaaagggccggcggtcgccagcagttgccccctccccttgggtcccgggcactcagcccatggctgccagcctgtgccactcgccgcggcaccggagcgcgccccggcggcgactggcacaggcgagccctcagctgccccctccgggcctgggctgtcctcccagggacgctccatcgcggtgggaggactcggagaggcgggaaagggagggttctgcagcagggcggtcgcagcctgagcctcttctccccagcggaggggtctcctctgtcctgggtgtccgggcactgcgccctcccattgcccacccacctgtgaactgagcttcctgggctgcaccccaaggacgccccgtcgatgattcggaggggtcttcagtgggttgcttagcaggagtcttcagtgggggccaccttagcctgagtcctctcccaccagcagataggttcccgctgctcccgggcacaggcccctcccaatttcccgctcccgcccccggctcagggcgagtgggggtggggcgggcccgggcaggattgtgatgggaacttgccgctcctcagataaggagggtctctcctgtcccaccccctggattccgtgttcccccgaccgattctctcccacccttatcgctgacgacaaagtgatttactcattaatggtgtttctgggctgtgtccttagcagacagtaaaccccagcaatgtaagaatttcttttttttttttttttttgagacaagatcttgctctgtggcccagagtggagtgcagtggcaacatcataagtcactgcagtctcgacctccgcggctcaagccatcctcccatctcagccggctgaacgtagctgctgggactccagtcgcttgcaaccatgcccagataatgaatgagtgtctccctcacttcctctgtatctctctcaggaggatctcagagtctctcgcctgcgtgtctctttgtctctgcgtgtctctttgcctctgcgtgtctctttgttgctgtctgtgatgctctcccacgcctctcccaggccactgctcctccaacgaccagtcccgctggccccgaaacgcccccaccccgacttcccaggaacttccagacggtcccagctcttccaccctcagattcaggaagggaggctgggtcccgctgctgcgaccttctccaggaccgtgccctttgcccctgatgcttcaggccctgctggccgcgggtggggtgagggcgccccaggagagatgagccagaggctgagaataagtgtggatccgggataccctcgtgggaggaaactcagggggcactcaggccgggtcaggcccccatgtagccccttggggatcccagccctcctgcccccgctgttccctcggtgggcagaacctttcctgcctgctctgctcaaagacacagccaatgggacccgcagggtgggacggtgttaacccttcagtgccaggttccccagtcctgtggaccaagccaactccaatggtgcccactgggatgacccctgaagatctcccagcatggctgtggctggcacccagtaggtgctcaataaatgacctccttctgtaaaggggaagccgcgccccagggtggggaggtggctgcttcacacctcccaggcgccaatctcacttctctcgaaaatggggctcttccggctgcgggtcccgggctcagcaacctgcctctccagctgcctccctgaacttctttcccacgaattgggaccctggggactcaggctccaggatctcgacagatgttgggagtcccatccctagctgccactccacactcctggccacagttcttaaaactcagatcacatttcttttctgctccaaaccctcccgtggctccctgtgtttctcagagtaagtgatcaagtcctcagtgaggaccccgcaaggacaaggccatatgccgtcctgatttgtctctttctgttacttctgtgcctctctctgctccactctgcttctgcctcccgggctcctccgagttccacacacacttcaagacttttgaacttgggggccaggtggcctggagcacccttctccccaccccttcccagctggtcagctggtcacctcctcagagagaccttccctgatctgtccctcatctcaaatggcagttggcattatctgaaatcaccttgcttttgctttttttttttttttgtaatctccctttattgcccaggctggagtgcagtggtgcgatttgggctcactgcaaacttcgcctctgcaacctccgcctcctggcttcaagcaattctcctgcctcagcctccagagtagctgggattacaggaatgcaccaccccgcccagctaatttttgtatttttagtagaggcggggtttcaccatgttggccaggctggtctccaactcctgacttcagatgaatcgcccgcctccccctcccaaagtgctgggattacaggcgtgagccaccgtgcccggccaccttgttcatttcatttatttattcatctttcctaatgtgtatctctgacctagagcctcagctccaggaaggcaggtctgtccctctgcccagattcctaaaggttaagggctcacagttttttgatttttctttcttttgtgagacagcgcctcactctgtcatccaggctggggcacagtgccgtgatcacagctccctgcagcctcgactttccaggcttcaagcaatcctctgcccaacctccagagtagctgggaccgtaggtgccagccactgcacctggctactttttaaaattttttgtagagacagggtctcgccaggttacctaagctggccttgaactcctggactcaagcaattcttctgcctcagcctcccaaagtgctgggattacaggagtgagacaggactcaaggtcttgaggcaggcaagtgatacccactgtgagcctcagtggacttatctgtaaaattgagataatagccaggtgcagtggctcatgcctgtaatcccagcactttgagaggccgaggtgggcagatcacctgaagtcaggagttcaagaccagactggccaacatggtgaaaccccatctccactaaaaatataaaacttagccgggcgtggtggcgcgcacctgtagtcccagctactccggaggctgaggcaggagaatcacctgaacctggcaggcggaagttgtagtgagtcaagatcgcgccactacactccagcctgagcaatgcagtgagactccatctcaaaaaaaaaataaaaataaaattgagataaccgcacccactccaaggctgttgttgaagatgaaatgaacagttggaacagagccaaggtatacaatgagagctccacaaatgtcagtgcagctattattggtcaccactgtatccccaaagaagaattagggcaatgggctcataaggaatcagccccagacattgccaccacccgcccccaccccatacctcctcccacaccccacaggccaaactgtctcttcccgggttcagggcacccctggcctctatgttcctgctgtgtcttgcagcagccctcccgcctgaagcatgcctaggccagcacacccgctgggccagttctgctgccagcaccctcgcccacagaggcagctccacccagcgcccgctcttgcagagctgggtctgcaccttcgagagggcaaactgcctcccatggtaccctcagatccccttcacccactcccattcccaccctcctcactccccctgccctttttttttttttttttttttttgagacggagtcttactctgtcacctgggctggagtgcaatggcactatctgggctcactgcaacctccacctcctgggttcaagcaattctcctgcctcagcctcctgagtagttgggattacaggcacgcgccaccacacccggataatttttgtatttttagtagagacatggtttcaccatatgggtcaggcttgtctcgaactcctgaccttgtgttccacctgccttggcctcacaaagtgctaggattataggcgtgagccaccctgcccggtctttttttttttttttttcttgagatagggtctggctctgccacccaggctggagtgcagtgcgcagtgatcttggctcagtgcaacctccaccccgagttcaagggatcctgccactacagcctcccaagtagcatgcgccaccatgcccagctactttttttgtatttttgtagagacagagtttcgccatgttgcccagactggtctcaaactactgggctcaagtgatcctgctgcctcgacctcccaaagggctgggattacaggcatgagccactgcacccggcccacattccctttttcacagccctgaaacttaaatgtggctgcagggaggtgtgaactgacaactttcccacagccagagaacagagaggcagggtttgggggtctcaaacgggaggcccgagggccaactccaactcacatgcacaaggcttgtttgtgcagctcagtgaggtttcacactcaaacagctatccgaactggacagaaatgctgcactctagccagtaaatttgtttctcttagaagtacaaggcaacaggctgggcgcagtggctcacacctctaatcccagcactttaggaggccgaggggggtggatcacctgagatcaggagttcgagacaagcctgactaacatggtgaaatcccaatctctactaaaaatacaaaaattagccgggcatggtggtgcacgcctgtaatcccagctactccgaagactgaggcaggagaattgcttgaaccggggaggcagaggttgcagtgagccgagatcgcgccactgcactccagcctgggtgacagagcgagactccgtctcaaaaaacaaaaagaaaaagaagtacaaggcaacaattctgaaaatgctttcatgctaacattgaacaaataagtacacgtgttgtagatatgaataaccaggtttcatactgttggggaaaaaaaatgacaaataagccaggtactgctgcattgaggttatcagtatgagctcaagtttattttaataaatggataagaaaataaatatagatatgtgaccaggtgctgtggctcacacccataatctcagcactttgggaggccaaggcgggtggatcatgaggtcaggagatcgagaccatcctggccaacatggtgaaatgccatctctactaaaaatacaaaaattagctgggcttggtggcacgtgcctgtaatcccagctactcggaagctgaggcaggagaatcgtttgaaccagggagtcagaggttgcagtgagccgagatcatgccactgtactccagcctggcaacagagcgagactctgtctcaaaaaaaaaaaaaaaagctggacgctatggctcacgcccacaattccagcactttgggaggtcaaggtgggtggatcacgaggtcaggagttcgagacaagcctgaccaacaaggtgaaaccccgtctctactaaaaatagaaaaaaattagccaggcatgggggtgcatgcctgtaatcccagctactcaggaggttgaggcaggagaatcgcttgaacctaggaggcagaggttgcagtaagctgagatcatgccactgactccagcctgggcaacagggtaagactccgtctcaaaaaaaaaaaaatttttttttaattagaatgtggtgaaggttgcaccactctgtaaaatacactaaaaaccacagttgtatatttcaagtgtgtgaatttgatgacatctgaattatacctcaataaagctgttaaaaattatatttgacatttatcaagtggttagttcaaagcggggcaatgtgctgaactttctacaccatgttacattcccacccagaacatcatgtgagaaggaaagggacttttatgtctccactttataggtgtcccagattgagatctgagaggttaagcaagctgtccacagtcacacagaaatggggtgaacaaactacagaggtctggcattggaggcctggcaaccctgggcttcccctccggtcccctgctccttacttgttctaagctgagctcatggcatactgcaatgattttagtttctgccacacacacattctttccagcctccaggtacctggatttgctggttcaatccttctgcctggctgttttcccttttctttttctttttttttttttttttttgagggagtttcgctcttgcccagactggagtggtgcaatggcgcaatcttggctcaccgcaacctccctctgcctcccaggttcaagcaattctcctgcctcagcctcccaagtagctgggattacaggcgcgtgccatcatgcctggctaaattttgtatttttagtaaaggcagggttccaccatgttggtcaggctcctctcgaactcctgacctcaggtgatccaccagcctcagcctcccaaagtgctgggattacaggcgtgagccaccacacctggcctgtttccccttttctttccacatagcctgtgaaatgaatgtctaagtgtgagggcacgagagacagatgtagagagagacagagatagaggaaaggtgccgagtccagagctccacatctcggcctgggaggtgaggggtgccaggggcacctggaagggttgcttggagggaactatccaggaaatgcttggccaccgacctccatctatagcgtttaaagccatctctcttccttggcctggagtttaagccaagctataattcaggacactcctaagaggatgaggtcagattttccccaggagaattcaccaggcctgggggtgagcaggtggcaggagagaggcatggccctgccagagtcctcccagcaccttgggacaaggtgttcccctcccctcactactgtgctgctttctcttcccttctccttcccaactcaaagcctcatctcagagccttttagaatctctgatagaccgggcacggtggctcacacctgtaagcccagcaactttgggaggctgaggtgggcggatcacctgaggtcgggagtttgaaaccagcctggccaacatggagaaaccctgtctctactaaaaaatacaaaatcagccaggcgtggtggcacatgcctgtaatcccagctactcgggaggctgaggcaggagaattgcttgaacccaggaggcggaggttgccgtgagccgagatcacgccattgcactccatcctgggcaaaaagatcaaaactctgtctcaaaaaaaaaaaaaaaaaaagaatctctgataaaatgtacactagggggtgggtgcagtggctcacaccccgtaattctatcactttgggaggccaaggtgggtggatcgcttgaggccaggagttcaaggccagcctgggcaacatagcaagaccctgtctctacaaaataataataaagattatatatatatatatatattcactcatgcgcagtggctcatgactgtagtcccagctacttgggaggctgagacaggaggatcacttgagcacaggagttggaggctgcagtgaactgagatttcaccactgcactccagcctgggcaaaagagtgagatccggtctcaaaaaaacaaacagaaaaaaaccctccagggcaggcacagtggctcacacctgtaatcctagcactttgggaggccaaggccggtggatcacttgaatccagaagttcgagatcagcctgagcaaaataggaagtccctgtctctatttaaaaaaaagaaaaaaaaaaaaatatatacacacacacacacacacacacacacacacacgtacacacacatatatatacgcacacatatatatgtgtgtatatgtgtgtgtgtatatgtatatgtgtgtgtgtgtgtgtgtgtgtatatatatatatatgcagggcgtggtggctcacgcctgtaatcccagcactttgggaggctgaggcgggtgagtcacctgaggtagggagttcgagaccagcctgaccagtatggagaaacccgtctctactaaaaatacaaaatagcccgatgtggtggcgcatgcctgtaatcccagctacaagggaggctgaggcaggagaaccacttgaacccgggaggtggaagttgtggtgagccgagatcgcgccattgcactccagcctgggcaacaagagcaaaactccgtctcaaaaaaaaaaaaattatctgtcctctgtgtattcatccccacctcttccctaacccccggcaacctctgatcttttaactgtcttcatagctttgtcttttctggaatgtcatacaactggaatcacacaacatgtagccttttcagattagcttctttcacttagtgataggcagttaagcttccgccatgtcttttcaaggcttgatagctgatttattttattttatgtttttttacatacatatatatatacatatacatatacatatacatatacatatacacatatacatatacatatacatatacatatacatatatatatatacatatacatatacatatatatatacatatacatatacatatatatatacacacacatatatatatatatatatttgaaacggagtctcactctgttgcccaggctggagtgcagtggtgtgatctcggctcactgcaagctccgtctcccgggttcactccattctcctgcctcagcctcctgagtagctgggactacaggcacccgccaccacacccagctgatttttcgtatttttagtagagatggggtttcaccgtgttagccaggatggtctcgatctgctgacctcatgatctgcccacctcggcctcccaaagtgttgggattacaggcacgagccaccgcgcccagcctttttttgtgtttttagtagagactgggtttcgccatcttgtccaggctggtcttgaactcctgacctggtgatccacctgcctcagtctcccaaagtgctgggattacaggcgtgagccagagcgccctgctattattattaatttttagagacagggccttgccttggcgaccaggctggagtacagcagtgtgatcctagctcactacagcctccaattcctgggctcaagcaatcttccttcctcagccccctgagtagttgggactactccttatgcttggccaggcacagcggctcatgcctgtaatcccaccactttgggaagccaggtgagaggatcactggagcccaggaattggagactagcctgggcaacatagtgggacctcatttctacaaaaatattaaagaattagccaagtgtggtggggtgcacctgtggacccagttactcagggggataaggtgggagaattgcttgagcccaggaggtagagattgcagtgagccaagatcataccactgtactccagagtggctgactgaacaagaccatgtctcaaaataaataaataaacaaacaaacaaacgaaaaaataaactccatactcatttagcaatcactcccattcccccgcctcccaacccatggcaagcgcgaatctgctttctgtgtctatggatttgcctttttttttttttttttgagacagagtcttactctgtcccccaggctggagtgcagtggtgtgatcttggctcactgcaacctccgcttcccaggttcaagcaattctcctgccccagcctcccgagtagctgggattacaggcacgcgccaccatgcgtggctaatttttgtatttttagtgaaggtggggtttcaccaagttggccaggctggtctccaaggcctggcctcaagtgatctgcccgcctcagccttccaaagtactgggatgacaggggtgaaccactgagccccgccaaggatttgcctattttggacattttatatcagtggaatcatataatttattgtattctgtgactagcttcttgcactaagcataatgattgaaggtcaactcacattttagaatgaatcggtacttcattcctttttcttttttttttttttttttgagatggagtctcgctcttgttgcccaggctggagtgcagtggcacggtgggatctcagctcactgcaacctctgcctcctggcttcaggtgattctccctgccccggtctcccaagtagctgggactataggcacgcagcaccacacccagctaatttttgtatttttagttgagactgggtttcaccatgttggtcaggatggtctcaaactcctgacctgatccacccgtcttggcctcccaaagtgctgggattacaggcatgagccactgcgtctggcctttttttttttttttgaaatagagatggggtcttgctatgttgtcctgatctcatgggcccaagtgattctcccacctcggcctcccaaagtgctgggattacaggcatgaaccatcgtgcccagcccaacttaattcctttttatggctgagtaatattccattgcatggacaaatataggacattttaattttctattcatcagctgatggacatttgagttttctctactttttacctggcaagaataatgctgctatgaacatttccatacgtgcattttatatgtttgtatgttttcttatctgttgaatatatacctaggcatgcaattgttggctcatattagaacctgaggaattgttttccaaagcaaacaactagactcttttcttttcttttttatttcctttcctttcctttcttttcctttcctttcctttccctttccttccttccttccttcctctctctctcttttttttttgagacagggtctcattctgttgcacagattggagtgcagtgttgttgttatcatggctcactgtaactccaaactcctcggtttgagtgatcctcccacctcagcctcccgagtagctggaactacaggcatgtgccaccacacctggctaattttttttttttttgagacggagtctcgctctgttacccaggctggagtgcagtggcatgatctcggctcactgcaagctccacctcccgagttcacgccattctgctgcctcagcctcccgagtagctgggactacaggcgcctgccaccacgcctggctaatttttttgtactttttagtagagatggggtttcaccgtgttagccagtatggtctcaatctcctgaccttgtgattcgcccacctaggcctcccaaagtgctgggattacaggcgtgagccaccgcgcccggcctacacctggctaatttttttgtattttttgtagagacaaggttttgccatgttggccaggctggtctcgaacacctgggctcaggtgatccaccttccccaggctcccaaagtgctgagattgtaggcatgaaccactgcacccagcctagaccattttctaaagcaatggcaccactggccaggcatagtggcccatgcctataacctagaactttccgaggctggtgtgggaggatcatttgcccccaggagttctagaacagcctgagcaacataacgagactcccatctctacaaaaaataaaaagttagccatggtaatgtgcacctgtagtcacagctactcaggaagctgatgtggaagaatcacttaaacccaggagttccaggttacagcgagccatgatcacaccactgcactccagtctgtgcaacaaaatgagaccttgtccctaaaaaaaacacaaaagaaaaagaaggaagaaatgcatttaaaaaaataataataagaccgggagtggtggctcacgcctataatcctagcattttgggagccagaggcgggcggatcacctgaggttgggagctcaagaccagcctgaccaacatggagaaaccctatctctactaaaaatacaaaattagccaggtgtggtggtgcatgccagtaatcccagctacttgggaggctgaggcaggagaatcgcttgaacccaggaggtggaggttgtggtgagccaagaccatgccattgcactccagcctgggcaataagagtgaaagtctgtctcaaaataataataataataataataataataataaaacaatgacaatattttaccttcccaccggcaatgtataaggattacaatgtctctgaatcttcaacaacactcgttaatttcttctttgtttgtttttgttgttgtttgttttttgttttttgtttttttgagacggagtttcactctgtcacccaggctggggtgcagtggcgcgatatcggctcgctgaaacctccacttcctaggttcaagtgattttcctgcctcagtctcccgagtagctaggattacaggcgcacgccaccatgcccagctactttttgtatttttagtagagatggggttttgccatgtaggccaggctggtctcgaactcctgacctcaggtgatctgcctgcctcagcgtcccaaagtgctgggattagagatatgagccactgcccccagacctattttctgatttttattgtggccatactagaagacgtgaagtggtgtctaattgtggtttggatagttattactagctgggtgtggtggctcacatctgtaatcccagcactttgggaggcacaggggggagaattgcttgaagccaggagttcaagactagcctgggcaacaaagtgagacctcatttctaaaaagaaaaagaaaacattagccaggcctggtggtgtagtggtgggcctctgcagtctcagctactcataaggctgaggcagggaggatcgcttgagcccaggagttcaaggctgcggtgagccatgttcacgttactgcattccagcatgggcgacagagcaagatcctatctaaaaaaaaatagaaacaggctgggcatggtggctcatgcctgtaatcccagcactttgggaggccgaggcaggtggatcacgaggtcaggagatcaagaccatcctggctaacacggtgaaaacctgtctctactaaaaatacaaaaaattagccgggtgcagtggcgggcgcctgtcgtcccagctactccggagctgaggcaggagaatggtgtgaacccgggaggcggagcttgcagtgagcggagatcaccccactgcactccagcctgggtgacagagcgagactctgtctcaaaaaaaaaaaaaaaaaattagaaacaggccgggcacagtggctcatacctgtaatcccaacaatttgggaggccaaggtgggtggatcacctgaggtgaggagttcaagaccagcctggccaacatggtgaaaccctgtctctactaaaaatacaaaattagctgggcgtggtggcacatgctgtaatcctagatactttggaggctgaggcaagagaatcacttgaacccgggagacagaggttgcagtgagccgagatcacgccactgcactccagcctgggcgacaagagcgaaactccgtctctattgatcacgacactcacagtgcagtccatccttcttttctttctttttttttggggggggctgtgggggttaaggtctcactctgtcacccaggctagagtgcagtggaacacagtttattgcagccttgaccttctgggctcgaatgatcctcttccgttagcctcccaagtagctgggatcacaggcatgcaacaccatggccagctaattttttcatttttagtttttgtagaaatggggtctccacatgttacccaggctggtctggatctcctgggctcaagtaatttacccaccttggcctaccaaagtgttgggattataggcatgagctcactgttttacccaagctggtcttgaactcctggcttcaagggatcctccaacctcgccctcccagaatgttgggattacaggtgtgagctaacatgcctggcaaacagcatacattctttttattgctttaataaaaatgtaattttgtttctctttgaaggatactgttgagaagtgtaattactatgatgtataatttgtccacgtaggggtacttgctttttttttctttacttgactctttgttttttttgaggcagagtttcactcttttgcccaggctgaagtgcagtggcgcaatcttgcctcactgcaacctcctcctcctgggctcaagtgatcctcctgcctcggcctcccgagtagctgggactacaggcatctgccaccaggccagcctaattttcttttctttctttctttttttttttttgagacagattcttgctctgtcacccaggctgggtgcagtggcacaatctaggctcactgcaacccctgcctcctggattcaagccattctcctgcctcagcctccccagtagctgggattacaggcgtgtactgccacgcctggctaatttttgtatttttagcagagatggggtttcaccatattggccaggctggtctcgaactcctgacctcgtgatccgcccaccttggcctcccaaagtgctgggattacagatgtgggccactgcaccgggccctaattttgtattttcagtagagaacaggtttcaccatgttggccaggctggtctcaaactcttgacttcaagtgatctgcctgccttggcctcccaaagtgctgggattacaggcatgagccactgcacccagcctccagtgtctgggaatgtgccgtttgtcttaccaggaatacatttccttcccccccttttttttttttgctaactcctactcatccattagattccatgatagacatttctagcatagacaacaatccattgaatgaaaaactgccatttgcagatagctggctctcctgactaattctgaccattgaagtgggagtgaggtggcatacattattctatatgtctttcagttctgaacagaggcatccaaaaacttatgcatggctctcctgtctgcctcttgctcctctgtgataactgaagcagagagtttcagatagtgcagccacaagatgacgggagacttgtcatcctgggctcctgaatgactgtgtggagctgagcccctgccagtccatataggatgaatagcctgagggagaaatcaactttgattgtgttaaaccactgagctttgggctggtttgttactgcagcaaatcttgacctactctgactaatacagaacccaacttaaatgtggcttccccagagaagtcctcctggatcacagcccccagaatcagtttcttccccttttgtaagcttgtatgttcttacttgatcattactgcaaacataactgtataattatttgtgtaatgagttcatcatctctctgctccaccccatctccaaaaccccaaggggagacaacagtgtggattttccattgctgcagcctggactcaaaatagtgtctgatgcatagtaggtaccctggatacatttgttgaatgaaagagttttgtggcagggcgcggtggctcatgcctgtaatcccagaactttgggaggccgaggcaggctgatcacgaggtcaggagttcgagaccagcctggccaatatggtgaaaccctgtctctactaaaaatacaaagttagctgggcatggtggcacgtgcctgtagtcccagctactcgggaggctgaggcaggagaatcgcttgatcccgggagatggaggttgcagtgagccgagatcatgcaactgcactccagcctgggcaacagagtgagactccgtctcaaaaaaaaaaaaaaaaaagaaaagaaaagagagagagtttttcatcctttcagccaaaggcagcaagaccaggcacagtggctcatgcctgtaatcccagcactttgggaggccaaggcgggccgatcttctgaggtcaggagttcaagaccagcctggccaacatggtgaaaccccgtctctactaatagtaaaaaaattagcctgggcatggtggtgcaagcctgtaatcccagctactcaggaggctgaggcaggggaatcacttgaaccctggaggtggaggtcgcagtgagccaagattgcgccactgtactctggcctaggcaacagtgagactctgtctcaaaaaaaaaaaaaaaggcagcaattagcaggactcttttatagaacatcattcatgtaacccacagggtaatggatgcatgagaggcgggactggatggccccaagaaacaggggaagtttgacaaggaacatgatctattgtgagaaagtacctatccacatagttaacgttttcttcaagactgtaatttgttccaacaactgctctgcctgggagggatttccgggcatgatttatttcactaagaggcatgggaactgggtggagatgcatggaaacattttttgaatagttgagaggcccaggataaaattcatgcacagacgccacaatgcagtcagtagaaggaaatgttatcttattgggttctactcaagggcagttttgagtcagtgctctaatgccaccatactgatttgttttctcaactctattaaggaatacttgacatgtaataagctgcacatacttaaaatattccatagcagaacatgggggcacatgcctgtaatccttgctgctcaggaggctgaggagggaggatcacttgagcccaggagtttgaggctgcaatgagctgtggtggcgccactgcactccagcctgggagacagagtgagacgataacaaaaataaaataaattagctggccaggcgcggtggctcatgcctgtaatccacacctgtaatcccagctctttgggaggccaaggcgggtggattgcctgagctcaggagttcgagactagcctgggcaacacagtgaaaccccatctctactaaaaatacaaaaaattagccaggcgtggcagtgtgcacctgtagtcccagctacttgggaggctgaggcaagagaattacttgaacccaggaggcagaggttgcagtgagcggagaacacaccactgcactccagcctggacaacagagtgagattccgtctcaaaaaataaaaataaaaaataaaataaattagctgggtgtggtggcgcatgactataatcccagctactgggggaggctgaggcaggagaatcgggagaatcgcttgaaccgggaggcggagattgcagtgagccgagatcgcagcactgcactccagcctgggtggcagagcaagtctccgcctcaaaataaatgaataaaataaaatagtctagttcctgtacatcttctccaacactcattaaggtcagtgtttctcattttagaggttctagaggattttggggggtatctgatttctatgttattttgaattttcccgatggctaatgatgttcagattctttttttttttttcccacagaaccattcaagtgtaactttttttttctttttatagagacggagtttcactatgttgcgcaggctggtcttcaactcctggcctcaagcaatcctcccacctcagcctcccaaagtgctgggattacatgtgtgagctaccatgccagtctttttttttttctttatagagaccagttctcactctgtcacccaggctggagttagtggcacgatctcagctcgtcacaacctccggctcctgggctgaagctatcttcccacctcagcctcacaagtagctaagaccagagacatgtgccatcaagcctgcctattttttttttttttttttgtagagacagggtctccccatgttgcccaggttggtctcaaacttgaactcctgggctcaagcaatcctcctgcctcagcatcgcaagtgctgggattacagtcatgagccaccgtgcctggccataatggatattcttttttttgagacagggtctgtctctctctggtaaccaggctggagtggagtgcagtggcgcactcacagctcactgcagcctccacctcctgggctcaatgctcccacctcagcctctgaagtagctgggactacagatgagtgctaccctgcccagcttttttttttttttttttttttttttttttgtagagaccatggtctcactatgttgcccaggctggtctcaatctccttggctcaagtgatcctcctgccctggccttccaaagtcctgggattacaagtgtgagacactgcactcggctgagagttttgttcttacagccgacttacagattcacaagcaatgacacagctgattaggaatgatggcaagtgtgatcaggtggacctgagaacacacacagggcgacttgcccaagctggaggtcaggacaggcctctgagctgtgggtgggcaagctgaggcctgctggagaagagggagaaaccgactccattcatttccaggcttgcagtaattaattcgcacaaactaggtggtttaaaacagacgtgtattctctcacagctctggaagctagaagtccaaagtcaaggttggtggtagagctatgccctgtctgaaggctctagaggggaattcatagctgggtccttcctagcttcccatggtctttttgtttgtttgtttgtttgtttgtttttgagatggagtttcgctcttgttgcccatgctggagtgcggtggcacaatcttggctcactgcaacctccacctcccaggttcaagcgattctcctgcctcagcctccttagtgcaggtgcctgccaccacgctcagctaatttttgtatttttagtggagacagggttttgccgtgttggccaggctggtctcgaactcctggcctcaagtgatccgcccacctcagcctgccaaagtactgggattacaggcgtgagccactgtgccccacccatttgacaaaaattttttaaaattagccaggcgtggtggtgtgctcctgtagtcccagctactcgggaggctgaggcaggaggacagcttgattcttgtagttggaggctacagtgagctatgattacaccactgcactcctgggccatagagcaagatcgagtctctaaaaattaatcaatcaatctgcaaagactctatttccaaataaaggcacattcacagatacccagggttaagacttccacatgaatatttggaggacagagaattcaacccacaatccaggctgacctgtgacagtgacagttatttggcatccaaagtgtggctacgagttcaatcttggaaagcctgggacagcccagccagggggttcctgaggtgtaggtgcgtggtgactggcttttttaagggcacgaatcttttgggagcagaaggaggaagacaggaggaagggaagaaattgttgagagacctgggtcagtctcaccagactgagtgcagaagccgaagacccctggcctctacactgggctcaaagtggtcaactccacggccaggggcaatggctcacacctgtaatcctagcactttgggaggctgaggcaggtggatcacatgaggttaggagtttgagaccagcctggccaacgtggtgaaacactgtctctactaaaaatacaaaaattagccgggcatggtggcacgcgcctgtaatcccagctactagggaggctgaggcaggagaatcgcttgaacccaggaggcggaggttgcaatgagccgagattatgccactgcaatccagcctgggcaacaagacggaaactccaactcaaaaaaaaaaaaaaggtggtcaactccaacagaatgtagtggtgtgtgcccatggtcccccctactcgggaggttgaggcaggatcgtttgaacccaggaggtcaaggctgcagtgagtactgattgcactactgcactccagcctgggtgacagagaccttgtctctatttcattacatgttgagatgataacattttggatgcgttgggataaataaaaagaattattaaaattgatatcacctgtttctttttacttttaaaaaatgtggctaatagaatattgaaaattatatttcatgttatttttctactggattgtacttctccaattttgggttggttttttttttttggtttgtttgtttttgttttgttttgtttttttaaacggagtctcaatcccgtcgcccaggctggactgcagtggagcaatctcagctcattgcaacctccacctcccgggctcaagcgattctactgccttagccccccgaatagctggaactacaggtgcctgccactatacccagctaatttatgtatttttaatagagacagggtttcatcacactgtctaggctggtctcgaattcctgacctcaagtgatctgcccgcctcggcctcccaaagtgctaggattacaggtgtgagccacagccgccggattcttttccagatttttttggcatgatggaatttgtttataaaaataccgttctaagctgagtggggtggtgtgtacctgtattcccagctactcgggaagctgaagtcggaggattctttgagctcaggagttggagaccagctagctagggcaacacagcaagaccctgtctcaaaaaaaaaaaaaaaacattaaaattaaaaaacagctaggtccttctagctgtttgtggatttgaggggtcagacatagcagctaagagaccagggactaggatgatggatgctggacccaggagggcagtggtgggaataagaataacaagaacagtcataattcacactgacgtggtggagaccatgtgcctggcactgttcaaagcattgtgcatattcacttcatccttctcccaaacactagaagggaggcagtatcactaccccatttggcagataaagaaactaagacagtggccgggcaccgtgactcacccctgtaatcctaacactttgagaggctgaggcaggaggatcacttgtgcccagggattcaaggctgcaggaagcaatgattgcaccatcacacttcagcctgggcaacagagtgagaccccgtctctctctctttttttttttttccaatgaatcaattttattttcagactttcatagttagtctaattaaatcaatttaaagttctcactttcttgacatgcttaagaagtatagtgtagtgggtgaaatcatagacgccggagacaggacttcctgggttagaattccagatcagcaacttactagaatgaaaccttggccacattatgtcatctctttgtgtctccatttgctcattgcttggcgataggtgattgtctcaccgctcagcgataggcgatggtctcaccgctcggcaattggcgaaggtcccatctgggtcgccaaaatgtgtccggaattggtgggttcttggtctcactgacttcaagaatgaagccgcggaccctcgcggtgagtgttacagttcttaaaggtggcgtgtccagagtttgttccttctggtgttcagatgtgttcggagtttcttccttctggtgggttcgtggtctcgctggctcgggagtgaagctacagacctttgcggtgagtgttacagctcttaaaggcagtgtggacccaaagagtgagcagtagcaagatttattgcaaagagcgaaagaacaaagcttccacagtgtggaaggggacccgagcgagttgcccaaccccatctctcaaagaaaaaggaactgaggcagagagtggcgaggtcccttatctgagccatctggctgcacagtctgtactgagtgcagaatccaaagacccctgggcctacactgggctcaaagtggtcaactccaatggaatgcggttgtgtgtgcccacggtgccagctactcaggaggctcaggcaggatcacttgagcccaggaggtcaaggctgccatgagtcctgattgaaccactgaactccagcctgggtgacagagtgagactctgtctcgaaaataatacacttgggcacagtggttcatgcctgtaatcccagcactttgagaggctgaggagggcagataccctgaggtcaggcgttcaagactagcctggccgacgtggcgaaacctgtctctactaaaaatacaaaaaattagctgggtgtggtggcgcgtgcctgtaatcccagctactcgggaggctgaggcaggagaatcacttgaatccatgaggtcgaggttgcagtgggccaagatcgcgccactgtactccagcctgggcaacagagtgagactctgtctcaaaaaaaaaaaaaaagggaattggggttggacgcaatcttgagggtggggccctcacaccattctcctgcctcagtctcctgagtagctgggactacaggcgcccgccaccatacctggctaattttttgtgtttcactgtgttagccaggatggtctttatctcctgacctcgtgatctgcctgcctcggcctcccaaagtgctgggattacaggcatgagccaccgagcccggctgagaccaggatgtcaaggcttcagtgagccaagatcatgatgccactgcactccagtactggcaacagagtgagactgtgagaaaaaaaaaaaaaaaagaaaggaaggcaggtgagaggatataagataagaagagaatctcagctgggcgcggtggctcacgcctgtaatcccagcactttgggaggccaaggcaggcagatcacctgaggtcgggagttcgagaccagcctgagcaacatggagaaaccctgtctctaccaaaaatacaaaaaattagccaggtgtggtggtgggcgcctgtaatcccagttactcgggaggctgaggcaggagaatcgcttgaacccgggaggcagaggttgtggtgagccgagattgccattgcactccagcctgggcaaaaactccatctaaaacaaaaaaacaaaacaaaacaaaaaatagaagagaatcccaccaagaaccatgctggcaccctgatctgggactttctagcctctagaactgtgagaagcaaaggtgtgttgttttagcccccaaggctatggtatttgtcacagcagcccaaggggataaagacagtaaggttgtgataactactcccatgcggcggggagggggaaaaaggcagggaagagaaggagaccaaggatggagatgggggagaattttgagagtggtaatcttcgtgtaggggtgatatttgaataaagacttgcggccgggcacagtgtctcacgtctgtaatcccagtactttgggaggctgaggtgggtggattacttgaggtcaggagttcgagaccagcctggccaacatggtgaaaccccatttctactaaaaatataaaaattagctgggtgtggtggcacatgcctgtaatcccagctactcaggaggcaggaggatcactggtgcccagaaggtcgtggttgcagtgagttatgatcgtgccactgcactccagcctgggcaacaaagtgagaccctgccaaaaaaaaaaaaaaagacctgaaggaggtgacggagagccatggtaagaaacgtggtctgggcagagggaacagcaagtgcaaagactctgaggtggcattggctctgttgagtttgagaaagggtgcacttggctggttgcagtggctcaagcctgtaatcccagcactttgggaggcccaggcgggcagatcacctgaggtcaggagttcaagaccagcctggtcaacatggtgaaactctgtctctactaaaaatataaaattagccgggtgtggtggctcacacctgtaatcccagctactccagaggctgaggcaggagaattgcttgaacctgggaggcggaggttgcagtgagctgagattgtgccagtgcactccagcctgggctacagagcaagactctgtctcaaaaaaataaaataaaataaatcaataaattaataaattaatgaaagagaaaggggtcaattgtgattgaaggcgactgggaggagaggggaaaaaaggaaagtcagggaggtgactgccccttttgtgccttctccttcttggatcacaccctcattcaaatctttcttacctccttcagagagctgaggacagagccccggggctggccactagaggccaccctctccatggctcacagggtcactgcattgtcatcatgcagttggctctcactgagccccaactgttcctcaaataccactctaagcactttacattggtaagttcagctcattcccatacatctttatgagttagacacatttaaaactttttcctggctgggtgcaatcgctcatgcctgtaatcccagcactttgggaggccgaggctggcggatcacctcagtcaggagttcgagaccagcctggccaacgtggtggaatcctatctctactaaaaatacaaaaattagctgggcgtggtggtgtgcgcccgtaatcccagctactcaggaggctgaggcagcagaattgcttgaacctgagaggtggtggttgcagtgagccaagatcgcactagtgcactccagcctgggcaacaagagcgaaactccatctcaaaataaatacataaataaatgaaaataaaataaaaaataaaaattgtccctggccaggtgcagtggctcatgtctgtcatcctagaactttgggaggctgaggctaatcgtttcagcccaggagttcaagactagcctgagcaacactgggagactctatctctacagaaaaatttttaaaaattagccaggggtggccaggcacggtggcccacgcctgtaatcccagcactttgggaggccgaggtgggcggatcacgaggtcaggagatcgagaccatcctggctaacacgatgaaacctcgtctctactaaaaatacaaaaaatcagccaggcgtggtggcgggcgcctgtagtcccagctactcgggaggctgaggcaagagaatggtgtgaacctgggagacagagcttgcagtgagtcgagatcgcgccattgcactccaacctgggcaacagaacgagactccgtctcaaaaaaaaaaaaaaaaattagccaggggtggtggcatgtgcctatagtcctagctactcaggtggctgaggcaggagacttgcttaagcctcggcagttgagactgcagtgagccatgatcaggccactgcactgtagtctggatgacagagcaagaccctgtctcaacaacaacaaccaaaatctgtttgggcctcgcaaggttagagaaaaaaaattaaaaaataaaataaaataaaatattttcctgtagtctcagctacttgggaggctgaggcaggaggatcacttgagctaaggagtttcaggccagcctgggcaacatagagagaacttgtctctataaaaagttaactgattactttttaaaacaaagaggttttttttcagccttattgaggtataatagacatatacaaaaccatgcaaattttaagcgtacaatctgatgagttttcacacctgtgaagccactattacagttaagatactgaatttatccacagctccaaaaaatgtcttcctgcctgaggtggtggctcacgcctgtaatcccagcatttgggaggctgaggcgggaggatctcatgaagccaggagtttgagaccagcctagacaacatagcgagaccccttatctacaaataaaatttaaaaaattaaccaggcatggtggctcctgtctgcggtctcagctactctggaggctgaggttggaggatcagagttggaggctgcagtgagctatgaaagcgccactgcactccagtctggacaacagagccagatgctgtctcgacaaaacaaacactgaaaaaaactttcctggagcacttcattcatccctccctcccgcgcctgcctacccctggattttttttccctgagcataattctcatgaagattcgtctatgttgttgcgtgtattccagccctattttgcacatgaggaaactgaggcacagagaggcgtggcttgccccggaggtcacactagtcgatttggtcccaggccagggcgggttctgggtcggcagcccgcgcaggtgcactcgggaggcggggcgggcgctgcaggtgcgcagtcagtctcacctgggcgcctgccaggaggtcagtcctgggccctggggggcaggactaggggcggggccaggggcaggggttccccagctctgctgcctccgataagggcctgaaggggctgtcgcgctcctggcggtgtgataaggagggcggggggaggccgcgggaaggcgtcggggtttgaggtccccgcctggcgacccgggatcggggcaggaaaggcggctgggcggggagagggcggggcggggcgtctggcttggccacgcccaccgtcatccggggtcctggcccgctaagatggcgatggctgcggtagcagcggcggcggctgttgcctggcccggtaccctggggacgggggccgagtagcgccttccccgggccccgtgaaccggctgcgggtcgcccttggggggcagcggccgcagccccccacctgggccctcggtccgccctcccggcgcgtccatgaactcagtgtcgccggccgccgcgcagtaccggagcagcagcccggaggacgcgcgccgccggcccgaggcccgcaggccgcggggtcccagaggcccagaccccaacggcctggggccttccggagccagcggccccgctcttggctctcccggggctggcccgagtgagccggacgaagtggacaagttcaaggccaagttcctgacagcctggaacaacgtcaagtacggtgaggagggggcccggagatcgtgggggtgtcgggggccgttgaggaaaaccagaccccggtcctgccagttatcccacccttgttcccgtcctgagtcacctgtgggtcccctccctgcccggcccagggtggacctgtggcaggtccaatagtgttttcaagccccgcccattcccctgtgtgaccttgggcaagatcctttgcttcctggcgcctccgtttttgcccctctctgtaaaatgggtacaataatcagaactaccttccttcatcctgaattgatggtggacactcctgtagctgtcactgggggccccacctccgacggaatccccggagccaccccggagataggaactaggatcgtgcccatttcacagatgggggaatggaagcgctgttgctgtcatgcaagtgcttcatctcgctgggcgctgcccctacgtctccccaggttgggtggttaaaagccggaccagctttagcaagatctccagcatccacctctgtggccgccgctaccgtttcgagggcgagggtgagctggtggttgggaccagggctgggggaggcctctccacgcccgccggagtgtccctggtggcagctgacagacccgctcttgtaggtgacatacagcgtttccagcgggactttgtgtcccgcctgtggctcacataccgccgggacttcccgccccttcctgggggctgcctgacctcggactgtggctgggggtgcatgttacgcagcggccagatgatgctggcacagggccttctgctgcatttcctgcccagaggtgagccataggggggaaggggtgcactaggagtacagggtcaactgccatatcagcagtattagaattacttaccaactaagagttcaaagtcacgttagaattgtgtgtcaagtaagttttggagagatgagagttgtttataagagtttcagccggggttggaaacggtggctcatgcctgtaatcctagcactttgggaggctgaggcggatggatcccttgcggtcaggagttcaagaccagcctggccaatatgatgaaaccccatctctactaaaaatacaaaaattagccggttgtggtggcacacgcctgtaatcccagctactcccgaggctgaggtgggagaatctcttgaacccaggaggcggaggttacagcaagccaagatcgcaccactgcactccagcctgggcaacagagggagactctgtgtcaaaaataaaaataaaaaaaagtttcaccaggcacggtggctcatgcctgtaatcccagcactttgggaggctgaggctggtggatcatgaggtcaggagttcaagaccagcctggccaagatggtgaaaccccatctctactaaaaatacaaaaattagctgggtgtggtggcaggcacctgtaatttggcaaggtaaagcagagaattgcttgaaccggggaggcggaggttgcagtgagccgagatccgtgccactgcactccagcctgggtggcagagcgagactcagtctcaaaaaaaaaaaaagagttttggctgggcactgtgctgcatgcttgtaatcccagctacctgggaggctgaggtgggaagattgctcgtgcccaggtgttcaagtctgcagtgaactatgatcctgccactgcactccaacccgagtgacagaatgagactccaacaataacaggtcgagtgtggtggctcatgcctgtaatcccagcacattaggaggctgaggcaggaggatcgcttgagcataggcattcgacaccagcctaggccacatgacaaggctcctgtctctacaaaaaaattttaaaaattagctgagtgtggtggcatgtgcctgtgatcccaactactcaggaggctgaggcgggagaatctgttgagctcaggatttagaggctgtagtgagacgtgattgtgccactgcactccagtctggatgacagtgagatcctgtctttatttatttattttatttattattattattatttttttttttgagactgagtcttcctctatcatcctggctgaagtgcagtggagagatcttggctcactgcaacctctgcctcccaggttcaagcgattctcctgcctcagcctcctgagtagctgggattacaggtgcccgccaccacgcttgtctactttttgtatatttttttttttatcagagaaggggtttcaccatgttggccaggctggtctcgaactccaggcctcaagtgatccacctgccttggtctcccaaagtgctgagattacaggcatgagccaccgcgtctggctgagatcctgtctttaagtaacaaaaaataaataaataaataaggataagtatatgtttcaggaatatgtaaattctgttgaattacggggttcaggagcattcgcattgtgtgcggtgcatgtgtagatgggacctctgccccccacacactagcactgtttgactatgtgctccattccaccagactggacatgggccgagggcatgggcctgggcccccctgagctgtcagggtcagcctctcccagccggtaccatgggcctgcccgctggatgcccccacgctgggcccagggtgcccctgagctggagcaggaacgccggcaccggcagattgtgtcctggttcgccgaccacccccgggccccctttggcctacaccggctggtggagcttgggcagagctcaggcaagaaggcaggtgactggtatgggccatcgctagtggcacacatcctcaggtgagggctgctgcagggatcacgggagttgctgggtacccgcaggcactcaggccttccctcctgcccccaggaaagccgtggagagctgctccgacgtcacccgcctggtggtgtacgtttctcaggactgcacaggtaaggggctgggagccaagatcacaggggccccaccctgagccagactctgccttacccgattcttagagtgcatcttcctcagaggctggaacaagttgtggggcagagggacactggggaaggatgcaaggcctgtgcagtgggagatagtccctcttctccgtctctccctctggaacaagaaacttcaggggcttctccttgagtgatagaatagagacataaggccaggtgtggtggcacatactgtagtctcagctacttgggaggctgaggtgggaggattgcttgaacccaggagttcgaggttacagtgagctgtcattatgccattgcactccagcctgggcgacagagtaggatcctgtcgaaaaaaaaaaaaaaaaaaaaaagaggccaggcgcagtggctcacgcctgtaatcccagcactttgggaggccaaggtgggtggatcacctgaggtcaggtcactctgtcacccaggcttcagtgcagaggcacgatctcggctcactgcaacctctgcctcctgggttcaagcgattctcctgcctcagcctctcaaatagctgggattacaggcacgcaccaccataccaggctaatttttctatttttagtagagatggggtttcaccatgttgacaaggccggtcttgaactcctgacctcaggtgattcgcccactttggcctcccaaagtgctgggattacaagcttgagccactgtgcccagcccctgtaatttttttttttttttttttttttttttttttttttttttttttttgagacagagtctcactctgtcacccaggctggagtgcagtggcacagtcttggctcactgcaacctccgcctcctgagttcgagtgattctcctgcctcagcctcccaatagctgggactacaggcgcgtgccatcacgcccagctaattttttttgtatttttagtagagttggggtttcactgtctttgccagtatggtctctcgatctcctgacctcatgatcccccctcctcggcctcccaaagtgctgggattacaagctggagccaccgtgcccggctacctctgtaaattttttatgcaaaattgtaggtgtttgggaaaagattcgattttcagagaaccttatctccaaaatgggtctaatctacttctctaggagcacaaaatgggcttacgtagctgcaaggcagggggcaggagaatgggcccaagtaaatgggactggaggaggagggacataccaggatatttggtttaggggctgagtgcccagtgctccagcttctgtattggcaaaccgaggcatggagtcactgaggacctgtcaggcatggggctggggaggagcttgagagaacagtctctacctctcccttctgtatatacttttggtctacatcccagggcctcagttgcccactctgtaaaatggggatgtccacacctgcctggaggtcctgggattttctgggggtgtttggggggcactagaatgatgattttggttagtgatgacagtgttgccctctgagaaattgcacggttgaggttgagcccctggggttagagggctacgctggggcttgaagggtggcaagaaggtgacctgctgctgtcccgtccctccagtgtacaaggcggatgtggcacgcctggtggccaggccagaccccacagccgagtggaagtctgtggtcatcctggtgcccgtgcgactgggtggcgagactctcaaccccgtgtatgtgccctgcgtgaaggtaggttcagctgaattctaggacacctccacctgggagccctccagacttgtttagtttgtgttagggctgctgtttgtgcagccctcatcacttttttttttttgagatggagtttcgctcttgttgcccaggctggaggtcaataacgtgatctcggctcgctgcaacctccgcctcctgggttcaagcgattttcttgcctcagcctcccaagtagttaggattacaggcatgcgccaccacgaccacctaattttgtacttttagtagagacagggtttcaccattttggtcaggctgatcttgaactcctaacctcaggtcatctgcccacctcggcctcccaaagtgctgggataacaggcgtgagccaccacacgggccatccctttttttttgagacagagtcttgctcttttgcccaggctggagtgcagtggcacagtcttggctcattgcaacctccgcctcccgagttcaagcaattctcctgcctcagtctcccaggtagctgggactacaggcgtgtgccaccacgcccggctaacttttgtatttttagtagagacggggtttcgccatgttggccaggctggttctcaaactcctgacctcaggtgatccacccacctcagcctcccaaagtgctgggattacaggtgtgagccaccacgcccggcccatcccttctttttttatactatgcagcacctgctatgtgtgctccccactgtcccgactgctggggattcagaggggaacagaataggcaggagttctgagtgtgcctgctgggagcagacgttctgatgggaggatgctcagcagtggctatgtaaccaaagtagcatcactgtttggaatgaagccaggcacagtggctcaggcctataatcccagcactttgggaggccgaggcaggaggatcatttgagaccagtctgggcaacatagtgagacccccatctctacacaattttttttgaaaatattcgagtctcactctcttgcccacgctggagtgcagtgacaccgtcttggctcactgcaacctccgcttcccaggttcaagcaaatttcctgcctcagccacccaagtagctgggattacaggtgtatgccaccacgcccggctaatttttgtatttttagcagagatggggttttcccatgttggccaggctggtcttgaactcccgacctcaggtgatccacccacctcggtctcccaaagcgttgggattacaggcatgagccactgcacccagcctctacacaactttaaaaaaacagtaacccaatgaagggcagatgagggtagcagcagagcctagaaaagcgcctctgcagccaccaggcaaatgaggagccagaggagaagtgctccaggcaaaaggaacagcaagacagagaccctgaggctggaaagtcccctatgtatttgcatccgaataaaagccagttttcccagtgacccacagagcccggcactatttgtccacaccaccttcttgatgtcgggatatcccccaccttgacctcatatcctcctcccacactctgctgcagccacaggggcctcctcacctatttcagacactcccacctcagggcctttgcgcttgctgcccctgctgcttggagcactctttcagcagtgatgcatgtggctttttttttttttttttttttgagacggagtcttgctctgtcactcaggctggagtgcagtggcatgatctcagctcactgcaagctccacctcctgggttcatgccattctcctgcctcagcctcccgagtagctgggactacaggcgtccgccaccactcctggctaatttttgtatttttaatggagatggggtttcattgtgttaatcaggatggtctcgatctcctgacctcgtgatcctcccgcttcggcctcccaaagtactgagattatggacatgagccactgcttggctcctgttttaaaatattttttgcgtggggggttttccagtgagaaccagaaaacctgagacaaattctaaaagagctgtaatgtttgacctctttacttaaaatcacaaggctcccttccctcttttattcttttccatatagttatcacctctaacacatgagataaatcatgtaattggctgggcgtggtggcccacgcctgtaatcccagcactttgggaggcaggtggatcacctgaggtcaggagtccaagaccagtctggccaacatggtgaaacctcgtctctactaaaaatacaaaaattagctgggcgtggtggcgggcgcctgtaatcccagctgctcgggaggctgaggcaggagaactgcttgaacccaggagatggaggtttcggtgagccaagatcgtgctactgcactccagcctgtaatcccagcactttaggaggccgagacgggcagatcacctgaggttaggaggagttccagaccagcctggctaacatggtgaaaccccatttttactaaaaatacaaaaaattaacccgggtgtggtggcgggtgcctgtaatcccagctacttgagaagctgaggcaggagaatcgcttgaacttaggaggcggaggttgcggtgagccaattgggccactgcactccaggctgggtgacagagtgagactccgtctcaaaaaaaaaaaaaaaaaaaaaattcatgtaatcatcttccttgttagtctctcacactaggatgtcagctcctgagggcaagggttttgtggtcttgatcactgctgccctccagaggctgggttctcacagaggaggtgtttgccaagcgtttgttgagtggctgcctgacagcacctgcctaccctcctccctgcaggaactcctgcgttgcgagctgtgcctgggcatcatgggtgggaaaccgcgacactcactgtacttcattggctaccaaggtaggcccaccccctcctcactcctcccaccccccaccgcacccccactcacacctgcaccccctgcagatgacttcctgctgtacctggaccctcactactgccagcccactgtggatgtcagccaggccgacttccccctggaggtgagtgggagccccagtgtgtggttggggccatggcgggtgggcagcccagcctctgagccttcctcgtctgtctgccccagtccttccactgcacctcgccccgcaagatggcctttgccaagatggacccaagctgtaccgtgggcttctatgctggagacaggaaggagtttgagacactctgctcagagctgaccagggtgagcaagaggaaagctggagtggggtgaggggggcggttgggcagggctgggggtgaaagaggaacagaggcctcgagtccagcagagctggggtgctgcttccaggctaggggtcctaacctgggaaatgtgaagaatgtccacccctgaaaaggtgggaacgccaaagcccactgttaaggcatcatcccttggaggcagctgtatccaggggctcaagtggtgggaaccctccctgtctcttggccctgctgtccgaccaggactctacccttatgggggcgagagatggccaccagccattctgggcacccaccctgtggtcactggaagggaaacgcaggttttgcagcaaaaatcccaggactgtcagtctttggctgagctgggtcacatgctcatggctgagccaatcactgtggccaggggatggaaggtgctgattggctgctctctcctggagaggtggtcctgagaagcacctactaaataaacctgggctaaggaatatggcttggcactgtttgtggctgaccctgtctccctcttcccgccaggtcctcagctcctcctcagccacagagcggtaccccatgttcaccctggccgagggccatgctcaggaccacagcctggacgacctctgctcccagctcgcccagcccacactccggctccctcgcacagggcggctcctcagggccaaacgccccagctctgaggactttgtgtttttataaagggaggggatgaggggaaagatacaacactatttatttttttatttatgtcatgtcgggtgtgggatcttgagctctggcagtgatgatggtacttcctgttgtcagcccctcaagcccagctgcaaccagtctggggccattcagccagggacagagcccacagagcccatacacctgtctcccaccagcggggccctcctggcagggtagggaaggaggaccccgggcacccccctcagggcctgactcacgtactgtagtttgcactggacgcccgggccctccctgtcccaaagcccccttgggggaactgtggctgctgggggccaataaagctgtgtaacttgatcgtgggtgtggctgggcgcagcgttctgaggggatgtggggtctgggaggtgtctcgaggtgagagctccaagtcacgggaagtttaagtcagcctcagtttccacatccataaaatgggacgacttccttacccacagctacacgtgttttttaatttttttttttttttcaagagacagggtcttgctttgttgcccaggctggagtgcagtggtgcaatcatagctctctgtagcctcaaactcatggccttaagtgatcttccttccccagcctcctgagtagctgggactacaggcatgtgtcaccacattttgtagagatggagtctcgctaagttgcccacgctggtctccaattcctgggctcaagtgatcctttcacctcggcctcccaaagtgctgggattacaggcgtgcctggccacagatgagaggatctctgcagcagatagtacttgtgggtgcgagacctgtccagggcttgatttgaggagaggagcctgaggcccctgcctgctccctggtgctcaggagctgttcttgggcccctgttgtttcctccgctgccggcccagctggcggaagtgcagccgtttggggttgaggccaaaggcctgcagtctctggcggctgaactcgcatccaccaagcatcacagtggggcccagcagccgtgccttcttggccctcctccgcttctggggggctggcttcttgtggggtgatacaggggcttcctcttcctgtgctgggggactctccggccccatcaagctgccatcaagggctggcagctgcctctgtgggccggcttcatctctctgtggcttccctgtggcttccgcaggtgtctctgccctgagggagaaaagtcagggctcagcccaggcctgtcaagatcaggcccattcttgagcacgcatgccccattttacagacagggaaaggaggggcatagtgaagcagccgcacagcgaccgagggcctgcctgggattcagacctgggtttcaggccaaagccagcgcttttctacggaacccaaagactagattgtgaggctgaggattctggtatttgtgcctgggcctgccctaagctagtcacatcaattaactcattttagcctttttcttccttagagacaaggtcttgctgtgtcgcccaggctggagtgcagtcgcgttaccataggtcactgcagcctccaactcctgggctcaagcgatcttctcgcttgagtctcccaaagtgctgggattataggttggagcacacacctggcctcattttagctctaaataaactgtgtgcatctatcacccctgccttctagactgggcgaaagcaatcctaataacagctaagacctatggggcatttaccatatcttaatcactttacgagaattaactcatttcatcctctgcaacttgataaggcagaaccgtctctatctccatcttatgagaaagaggcccagagaggggtagcgacttgcccaaggtcacacaacgttggtgcccatataggattcgaacccaggtctcagagcggggggcgctgcattcccaaagtcatgcaacaagaggttgacggagccaagactcaagcctgggcctgacaggctccccacccacgcttccccagccagcactgcttactcttctcggcagagtgacttgaagacctgccgctttttccatgagttctgggccttctggctgtacgcccgcttgtcccgcagctcctcctgctctgacctgcagacagatgcccctgtgttgggtgctctgggaagtgcccgaggctgcccgccctgccccctgcgcatgtggccccgccgcgccccgccccatcacctgtacatgcaggtcttctttagggagcaccaccggttcagctccttatcgtcagcagcgaggatctgcgtgggaagggagagtggggacctgctgtgatattgcccaggcggggccttccctgagcctaagtcatgtcattagtcaaaacggtaatgccgctaccacccagcagggttgccatgatggccagagacagctgatctctacagaggccaatgatttttgtagaggtcagcagatggggtaactgaggctcagagaacggatccttgccctaggccagatggctgggaagttggctgaattgattccagtttgagcctcagggcccttgagctgtcacccatacccggccatccccaaagcctcagaacgggcaggggtcgctgccaaccaccaggcttcctaattacatatgaaactgtcattcccagcctctaggcctgtttccaaacctactggaaggccatcagaaagaggaagtgattgaatgccgatggtataagcttagtacacatcggctatttttactgaccatgaaaatggtcgtgcaccttcagccgtcatcagtcaggcatagtaggtacccacagcctgccaggtgccacacactttggtctcatttctgttccttccatagtcaccaaagttggggtgctatcaattattgtctcactttacagatggggagttgaggcacagataggggaatcatttgtccaaagactcagctggtgagcagccaagccagggcttgaacccacctaggccccctggttccagaggacaccaagtcttttgttgagacagggtctcactatgtcacccaggctggagtgcagtggcaggctcacagctcacagcagcctcaacctcctggactcaagcaaccctcctacctcagcctcccaagtagctaggactagatctccctatgttgctcaggttagtctcagaactactgggctcaagtgatcctcctgcttcagcctcccagagtactgggattacaggtgtgagccagtgtgaccagccctgctaccaagtcttaccagccagactgctgctaatacatactgacaggaataaaataatattggctgggcctggtggctcacacctgtaatcccagcactttgggaggctgaggcaggcagatcacatgaggccaggaatttgggatcagcctggccaatatggtaaaacttatctctactaaaaatacaaaaattaattgggcatgatggcacatgcctgtagttccagctacttgggaggctaaggcaggagaatcatttgaacctgggaggcggagtttgcagtgagctgagtttgcaccaccgcatgccggcctgggtgacagagcaagacactgtcccaatcaaccaatcaaaaaataaacaaaaataaaaagtaatattggctgggtgtggtggctcacacgcagaatcccagcactttgggaggccaaagcaggaagcttgtttaggcccagggagttcgagaccagcctgcacaacacagtaaaacatcatctgtacaaaaaatatttttaattaaaaaaaattaattgggcatggtggcacatgcctgtagtcccagctacttgggaggctgaggtaggaggatcaattgagcccaggaggttggcaccactgcactccagcctgggtgacagagcgagactatgtctcaaaaaaaagaagtaatatttacggggcgtgccataggtgaggcactgttttaagcccccaccttgtagaaggtagtaatattacctttgaggtgaggtaatgttattagcactgtcattaggactattagcatttctttttttttttttttggcgctctgtcacctaggctggagtgcagtggtgcaatctcggctcattgcaacctctgcctcctgggttcaagcgattctcctgcctcagcctcccaagtagctgggactacaggcgcctgccaccatgcctggctaatttttttgtatttttagtagagacggagtttcaccacgttggccaggctggtctcgaactcctgacctcaggtgatccacttgcctcggtctcccaaagtgctgcgattacaggcatgagccactgcgcccaaccgaatattatcattttcaagatgaagaaacagcctgccatgttgtggcatttctgagcaacagagattgggactcagggccagctttctaccccttcggcatacctggtgccccctgcagtgtccctgcctgcccggggcccctacctcctcagtgctgaggccaaagtcacagggcaccactgtgcggtacttgaagcgacagggcaggtcgtcgatgatgtcctcgtagtccagccggtaatactcatccaggtactcctcgaacgtcttgtcccctgctcgagacagagccaggctgctgggctatgccaggccccgcggtgccccctgcctacccacggcctgcccacctgggcctcaccgggttcaaacacgggcttctcctgccccacggccgcggcgaagggcgacttgcgcttcttcttgcccgtcaagggggcctcgcgctttttcttcctcggctggctggggtcgtagtcggcgtccatctgccaggacgcacaggtcagatcccaccagccccccgtcagggcccctgggactccctcaacccgtgatacctacgttgaagttggggtcctcacagtgcagctcctgctggctccagtctccctcctgctcaggcccgtcccacgtgtcccagttccagtcgtctggatgcagggagaacagacaggtggggccagggtgggaccttgggcttcagtcccagtccccagtccccaatccccagcccagtgccccagctgatctcaccttcaagcccttcttcttcctcaaattgtggcttctcctcctccacggccccgtagtactcgtccccaaagcacttctgcagggtcagggctggcggttaccagagcccactcgagacataggagctgagccccctacgatgccgccaatgaccccctccttggcaactttactcctacagctagggctccctacagccctcccagcacctagctcctgaggtgggaggccctgcatgtccaggatcctccgccaactcccctgctgtctaccctgtgatgtactggccgccattcagttccacatatccacagttcttcgccgtcctacccaccttcgcccctgtggtgcccaccacctggtgcactactcaggccccaggtcttttttttttttgaaacagaatttcgctcttgttgcccaagcaggagtgcaatggcactatctcggctcactgcaacccttgcctcccggtttcaagcgattctcctgcctcagcctccggaatagctgggattacaggcatgtgccaccacgcccggctaagatcttttttttttgagacagcgtctcacccagtagcccatgctggagtacaatggcgagatcttggctcactacaacctccacctcccgggttcaagcgattccctgcctcagcctcccgagtagctaggattagaggtgcacgccactacaccctggctaattttttgtatctttagtagagatggggattctccatgttggccaggatggtctcaatctcctgacctcgtgatccgcctgcctcggcctcccaaagtgctgggattacaggtgtgagccactgcacccggccaggtctttttttttttttaaaacagaggctccctctgtcgcccaggctggaatgcagtggcatgatctcggcttactgcaacctctgcctcccgggttcaagcaattctcctgcctcagcctctcaagtagctgagattacaagcatacaccaccacacctggctaatttttgtatttttagtagagatgaggttttaccatgttggccaggctgatctcgaactcctgacctcaggtgatctgcctgccttagcctcccaaagtgctgggattacaggcgtgagccaccgtggccagtgagagccatgtttgtgtgaactcagcgtcatgttgggccgggatgagggccgcacctgcatgagctggtcgtgctgggcagggtcgaagtcgtcttcaaggtccccctcctcgaggcccagcatctcgttgcctgttactttccgcagcttctccagcttggccagaatctccttcctcttcaggttcttcagctgcttgagctcttcctgcttctttgctttctcctgcaggcccaggcagagagggggagggcatgggctttcctccagggctggggggtcctccccagctcaccccccacactcaccctcttctttcgctcccgagtctcttccctcttctcctttctgcgctcatccttacggcgcacggaggacgcgatgctgcgtgggtaggtcttgacctaggcgcaatcagaaaagcccacaagggccgcagagatgatgtggggttccctgggcctgaaccctgggggctgagtcctccccagccccagccacacaccgatgctgagtccggctcctcgaaacggaaattgtacttctgttcaaagtcctcctgtttcttcagaaacagctccccttcgtctgaggagtcgtccacagccagctggactgggggaccgtggaccctgaggggcaagatgtggtgatgccagggggccagccaagtgaggtcgagcccccctttcctgcacgcctgggtacgaagcgtatgaactcatttaatcctcacaagaaccctacaaggtgcacgctgctattgtcctcattttacagatggggaaactgaggcatgaaagtcttgaagccgaaccaggatttgaggcagtgccacctggctccagagcctatactctgtggctctgccttacagaagactaactctgccaccatctgtgaaaaaaatacacacatggtgccctctgcctcctggccagtgccgcctgggaatacttcatgaagcgcacccaaaatctaggtcctggggagatgcagtggctcacccctcctcttcctccatttcctcttcatcttcctcctcctcttcctcctcctcatagcgtttgttgaggatgtaatcccgcaggaaccgctccccttcatccaactcagggtcgttccagtattccttgagatgcgtctgggggtgacaggagacaggactctggtcaatggaggacagggaaggagggcaggcatgctcaccacatggacctcacagccagcctctggagtaggtgacattagccccattttggtttcttatttttatttcgagacagggtcttactctgccatccaggtgacagtacagtcgtgtgatcatagctcactgcagacccaacctcccgggctcacaagatcctcccaccttagcctcccaagtatttgagactacaggtgcatgccaccatgcctggctaattttttcatttttttgtagagccattttgctatgttgcccaggccagtctcaaactcctggcctcaagcaatcctcctgccttgaccacccaaagcactgggattacaggtgtgaaccacggcacccagcctatccccatttaaagagatgtaggagctgaggcccagagatgtacatatcccatcttcagagggttactttctgtaaataggttggatggacgcggaacacgcggtctactccatcagcgaccatgcgtgagaactcaccagttccttcagggaatctgggttccgaatctctttctgtcccttcagccactcgatgtagtcggcctcctcctgggcctgggggaaagctagcactgagcatccgcagatgcccagccacccgccaccctgtcccccagcagtccagtcaggccccagtacccaccttctcctgcctggttttggcacgtttctgcagcaaactggagccgccctccccagcgccgtcctcgtcctcactgtcctccacaaatgcccggaagctgcccacgagagaaaacaagcctcaggacaggcaggctggcccctgtctgctgccccagtatttattttattttgtagagctggggtctcactatgttgcccaggctgatcttgaactcctgggctcaagtgatcctccctcctctgcccaccaaagccctgagattacaggcatgagccacctcacctggctggctgccccaagattaaccccatttactaagccctgagctctcctctcaacaagctcagagcagtgctgtgatgttattaaccccgtttaactgatgaggaaactgaagcacatagaaagtgacagagctcaatttgaacccgtgcctatccaacccccgagcctcaactttcctccattgggccattcccgcccacccagcctcacctttccttgagctgtttctgttcctccacataactttgcgacgatgtctcctgcagagagggccataggtctcaggccagccccaggcccctcagccccccgacccagccttcaccccacccacctggagtctgtgattggaagtctccccgtctgagttctcctcatcaacatatttgctgtaaaggaaaagtggggtcttcagaatatatcttccagggcccgcctgtccccatgcccatgcggagcagctattccaagcaacagctggcgggggtcatcggagggctatggaatcactgagactcctgctctcagggctatctgcgattctggtgagtttccagcgttttttttttttttttcttttccaatcatgggtgacagcatttcttttttggagccagggtctcgctctatccctcaggctggagggcagtggcatgatctcggaaaactgcaacctccacctcccagattcaagcgattctcctgcctcagcctccccacgtagctgggactacaggcgcccaccaccacatctggctaatttttgtatttttagtagagacggggtttcaccatgttggccagggtggtctcaaactcttgacctcaggtgatctgcccgcctcagcctcccaaggtgctggtattacaggcatgagccaccatgcccggccttttttctttttgagacagggtcttattctgttgcccaggctggagtgcagtggcctgatcatagctcactgcagcctccatctcctggctcaatcctcctgcctcagcctcctgagtagctgggactacaggtacacatcatcatgcccagctaatttttaatttttttgtagaggcggggtatgttgcccagcctggtctcaaacttctgtcctcaagcgatcctattgcctcagcctaccaaagtgctgggattatgggcatgagccaccatgcccggcccaggctgccagcttttttccctctcctgcccctaagacccccatagacctgacagggctgggaaccagggggtggggatgtaggccttctccataccctgccttctccaagataaccttcctctcgtagtccttcaggtacatgggccgcactttcttctgcttctccaaggcttctgggtcctcctcactgtctgatgacgatgctgttaacccaccaaagacacctgccatcacccacaacccccttctttgccgtggcagagaatcccacagggcagggccagggttagacagaggattcaaatcccaaatccaccaattcccagctgtccaagagtattgtgcttgtcaccatctggtggggttggggtcattcagtcagtaattcctgctttgattattattattgttgttattatttatttacttatttttttttgaggtggagtctcattctgttgcccaggctggagtgcaatggcatgatctcggctcactgcaacctctgcctcccgggttcaagctgttctcatgtctcagcctcccaagcagctgggattacaggtgcccaccaccgcgcccggctaatttttatatttttagtagagatggggtttctccatgttggtcaggttggtctcgaactcctgacctcaggtgatttgcctgcatcggcctcccaaagtgctgagattacaggcgtgagccaccgcacccggccattattattatttttttgagacagagtctcactccgttgcccagtgcatggcgtgacttggcttactgcaacctccgcctcccaggttcaagcgattcccctgcctcagcctcctgagtagctgggattacgggtgtgcaccaccacgcccagctaatttttgttatttttagtagagatggggtttcaccatgttggccaggctggtctcgaactcctgacctcaagtgatcctcccgcctcaacctcccaaagtgctaggattacaggcatgagccaccatgcccagcctgattaattattataattaatttttttgagagttggagtcttactcttgctcaggctggagtgcagtgtcaacatcctagcccacagctcactgcagccttgaactcatgggcttaagcaatcctcccacttcagcctcccaaatacctgggactataagcgcacaccagcatgctcagctgagttctgaatcttttgtagagatggggtcttgccgccaggcacagtggctcacgcctgtaatcctagcactttgggaggccaaggcggatggattacctgaggtcaggagttcgagaccagcctggctaacatggtgaaaccccatctctactaaaaataacaaaaaaatagctgggcgtggtggcacgcacctgtaatcccagctactccggaggctgaggcaggagaatcggttgaaccggggaggcggaggttgcagtgagcccagatcatgccattgcactccagcttgggcaacaagagcaaaactccgtctcaaaaaaaaaaaaagaaaaaagaaagaaaggctggctgggcgcagtggctcacgcctgtaatcccagcactttgggaggccagggtgggcggatcacctgaagttgggagttcgagaccagcctggccaacatggagaaaccctgtctctactaaaaatcccaaattagctgggcgtggtggcgcgtgcctgtaattccagctactcaggaggctgaggcaggagaatcgcttgaacctgggagacggaggttgcagtgagctgagatcgtcccattgcaacccagcctgggcaacaagagtgaaactccatttcaaaaaaaaaaaaagagaaatggggtcttgctatgttggccaaactggtctcaaactcctggcctcaattgaccctcccacctcagcctcccaaagtgctgggattagatgcttgaaccacctgcccagcctggtggagttggaatcattcagtcagcaattcccaccttgaatagtgccaaggacacagtcattaactccaccaccaggtaataacctaggctctgctaaggacttgtgacttgtgaagcaattcattcaatagtcaaaacagatgaactgtgtaaactgggtaaatcccaatctatccttaaaacagccctgaggggagatgctaccgttagatatactttacagacaggaaaagaggctcagagaagtcaagtcacttctctgaatccacagtcaggaaaggaccccggattctgctccagaggaaggagaggtttagacaggagtggccccggacctgttctgttatagaaggtggcatctttctgataaatgcgggggtccttcttcttcaacaaggagagcgttttgtaaaagtcccgctcctgctggggatcaaattcctagggcaggaaaagggttggggatagatttcagaagggagataataagagccctggcgccagcaggtgagctcagcgtagggattaggatggaggggggtggatctggctggggaggtcaaacaggtggtcaaacagcaggagggagaggggccctcttggggtgggcaggggcaggccacaggtaggtacaggatatgggtagaggaaggtgaggggcaaggagaaggtaattcctggggaagacaaagacttgacaaggggcaggtgggctgagggcacaagagagacagcggggaggggctgggccaggccgcacagtggggccaggatcagggctgatgtgagaagttgggcgccccacgtggcgcaaggagtacactaaaaaatggctagactcttgaggatgaaagaggaaagggggggttcttgggggacagagtcgccccacacatcagagtgggcaggtggggatcgtggcaggggagagaaaataacggggatttggctcccctggggagagggggggcactgtctgtccctcatgggatggggagcggaggatgggacgctcccgcagggcgctctggggttgggggttcccccccgtctacatcggggtcggggtgcagaggggggcttggacgcctccgcacgtccaggacggggcggggacgcgcaccacgcgctcgtcgcttgagtccgactcggagctggagtcgctgctgctgtctcggtccccgtagcgatccttcactgcgggacacagacgggatgcccccccccaggtcagccggcggggccactcgactccccacttcccaaccggccggcgcgcgcaggctcccgcgcgcatgcgccccgcactcacgccgctgcagttcctcgcgctcccggtagcggttgtaccgcgcggcaaacgccgcgttcacccgcagctgcgacgacccgcgcggttccggcatggcggttctgtggcccattgcgcacgcgcattgaggaagccctggacggggcggggccgccctcagtcccgcccgcatccacttgtaaacgaggcgtaccgctgctaaccccgcccctggcttttccgggatccctttcgcctcatcaccgcagtcaccgcccacggctacgcccctgcggggaaggccgcggccaccgcccacccgccccaccccctgtgctccgggcacccagctgacatctgggggccctttctccactcgcggtttcctgcttcccttccgttccgacagcgaaaaccgctgccccacccagctcactcaccctggcgccctgggaattactattctctcccctcacccaccacatccacgatccgcgacccccgtcctcatccccatcaacatccgggatgtgtaactctccatcccagactcaaaaatcagaagccacccgtgctgtgatcatgcacaagtcttaatttaatgggtaaaaacattaaattattacaacattttttccaataaagcataataaatagaatccatttcttttaaaacgctgtacaagagactggaaaacaagcttccaacagaatatgaataactcataactcattctaccttcttattgatttgggacgctccccccaccccccatgcctgaagcaacgtgcacacttcaggtctctgagcacagccggccaaggccaccagcttctaggctccctggaggtcatgacttcactcttaaatgctctgcccttgggtctcgtctgaggccccagcagcctgaggcgcagaagaaactgaaccgtttaggtggctgtggcctgcaggagcccttctctgtccaacacaccaaaaggagtgagaaaaacaaatgagaaacgtcccccaaacactcacacccccaaaaccaacacctataagccacaaactgtgctcctcccctactgcagcagtgggcaggagaaacaagaagagaaagtgtttcttcccctctcttctgatacataaccccacggggttctcttgctggagagggtgaccccagatcacagcggggccaccatgtggccctgcaggatgtccacgaggtcctgagcccctctctgcagtgccagctccaagggtgtgagacccctggcgtccctgcgatggagatcagattcagctgccagaaagctgaccacagcagtgtgaccctcttgaactgccagatggattggaagtgccccggtgccatcaggcacgttgacatcagccccgtgctccactaggaccttcagggtgtccaggaatccagtgcgggctgcgtcatggactggactggtaccggaggtgtcctggacattggggctggcaccttgcttcagcagctccagggcgatggcggtgctgccaaacatcatgacctgtgtgagggacagaggatcaggaggtcctcaagggaggaggttccacaaaaggggtcactggaaagagaagggtcatccagaaagaggcatctcccagaaacaggaaatgctagaggaggggtcctctagtgaacggagaagctgcataagcccccaggaaagttcttctgggaatagggaccccccccaaaagctggtcactcccttaagaatgagaccccccaacccagagaacagccccccatggaaactttcaaggaacctaagactctcccccaagggaccaaagacgcccccagatatgggcaatcaccaggaaacagaaaatcccctccaggaaatgggcccccagagatggagaactacccccaaagaattgatagtcctcataagggaaaaaagatgtcaaaggaaagcgaaccccttctccaggaaatagcctcctcctacataatggtgatgtcacctcagagtacctgagagctcctttcaagaagcgggattccaaaagtaataataaaagagaaacgagacttccctgtaaaatgtctcccagggaatatagggatgtcttgcaatctgacattgttcctccattggggcccccatactatatcaaggatccgcataacctttaggaatgaagaccccacccccaagtaaccagatttgtctcagagagccccctacaaaatgaggaacccctagagacaggacctctccttccagagatcggatctccccatagaagccccaagaaacgtgagccgtccccatggaaacggcatccaaaggagctgaacccgcacccacggaataagaacctccccagggaaagtgaatccccggcactcagagaaccaggaatcctcccagagaagatgctaaaaagctctcccctccccccacaacctagcctcacccaccacccaccttcgaagggggactgtgggggaacaatgaaagcctagagaagaaggaccggttcccagtgggtcaccaccagggccaggagaccagagaggagctctggggtctcgatcctcatcccgcttagccgccccgccccaacctggaccggcccggcctcacctgcagcgccgtcttgccgaagcggttgagggcgtcgggatgcaccagctcccggtgcagaaggcggcgcacctcctgcacgtcgccccgggccgccgccccactcagccggtcgccggcgcgaacctcctccagcagcatgtcgacactggcggcctgcaaagccccccgccccgccccagcccggcgctgtcagcgcggagcagccggcgggcgctggcccgaacagccctcccggggcgcggccgcggtgcacccggctgcgctgctctcccgtcccggctccccagcccgagaccccggccctcccggcgggctcctccccctgtcagccggaggacggcgaggggctgggagccgggcccaaccctcggccgcccgcggggccctgcccggcgcccgccccttgggggccgggtctccccctaactcaccctccctcctcctcgccgggcggggtctgctctgagcctgcgccgccgccgccgctgaggcagccgccagggggcggagccaacgtgctcccggccacgccccgaacgcaactgatttgttttcttacaaactcgctactgtgtagcggcaccgcgttgcccggcgcgcgaccttacggcgttccgcccacagggcctgcataaccagtggctgcgcgtcgccggggaaacttcgggctcggcgtgaaacgcgtcgctcctgattggtcagagtgtggcaaccggtggaccgccggcaatggcggggttttcggttttcaaatgaacccggcaggcgggaaagaaggctggtttaactgacccagggagaaaggtcaggggcagggtcgcgcgggctgctctgggacctcggcgcctcctgagggaagggaggcagggctggagccacccaatccgaggttccactactaatagacattcattggcccttactacgagctgggcgctttatttcattcatttattcattcactgtgtgcagggagcgtcctgggagctggacgcgcacattcaaacaaccaaataatattagatagtgtcaagcaccgtgaagaaagggaaacggagagacggagtggatgaggaagggatcaccctgccgggctcagactgagccagcaggaaaggagcctgcagctgccacgtgggaaggcctgagaggacatagtcgcagccagacagggactcagaggtcttcgttcaaatatttacttagcacctcctagaggggcccgagtggagagcacgccagtcggcccctgctgcagggacacctatggtctggggccagagacaatagttaatttttatttatatatgtatttatttttgagtcagggtctcactcctgtcacccgggccggcgtgcagtggcgcgatcacagctcactgcagcctcgacttcccgggctcaagtgatcctcctgcctcagcctcccgagtagctgggactacagggcgcaccaccacgcccggctaatttgtgtttttagtagatatgaggtttcactatgttgcccaggctggtgttttttgtttgttatttgtgtttggcttttaaatacagatttttttttttatgttggggttcttgctttgttgcccaggctggtcccgaattcctgggctcaacggatccttctgccttggcctccaaaagtgctgggattacaggcgtgagctcctgctctccgccaatagttaaatctttttagagtggtagaggactgaccagatgagccattgaaacggaaaggcaaaaagccgggcgcggtggctcacacctgtaatcccagcactctgggaggctgaggtgggcggatcacgaggtcaggagttcaagaccagcctgaccaacatggtgaaaccccgtctctaccaaaaatataaaaaattagccgggcgaggtggcgggcgcctgtagtcccagctactcgggaggctgaggcaggagaatggcgtgaaccccagggggcggagcctgcagtgagccgagattgcgccactgcactccagcctgggcgacagcgagactccgtctcaaaaaaaaaaaaaaaaaaaaaaaaattagctgcgcctggtggcacgcacctgtaatcccagctactcaggaggctgagacaggagaatcgcttgaacccaggaggcggaggtcgcaggagccgagatcgcgccattgtactccagcctgggcaacagagtgagactctgtctcaaaaaaaaaaaaaaaagaaaagaaaagaaaagaaaaagaaacgcaaaggcagggagggcctccctgaagaggtgacatttgatttgagacctaaaggtgagggagggagacttgtggttatatggggaaaagcacaccagctgggaggcacagcagatgctaaggcccagaggtgagagcgtgcctggtgtggtacagagcaggggagagcaggtaggtggggtatcaggatggcaattgtgcaaatcaagccatggcttttttatttatttatttattttaatttttttttaattttttttttgagacggagtctcactcgcccaggccagagtgcagtggcgctatcgcggctcactgcaagccccgcctcccgggttcacgccattctcctgcctcagcctcccgagtagctgggactacaggcgcccgccaccgtgcccggcctttttttttttttttttttttttttgagacagagtcttgctctgtcgcccacgcccgaccaggccatggctttaataagataggaatgccgagcgaagtggctcacacctgtaattccaacattttgggaagctgaggcgggtggatcacctgaggtggggagttcgagaccagactagccaacatggtgaaatcccatctctattaaaaaatacaggccgggcgcagtggctcacgcctgtaatcccagcattttgggaggccgtggcgggcggatcacgaggtcaggagattgagaccatcctggctaatacggtgaaacaccgtctctactaaaaatacaaaaaattagccaggcgtggtggcgggcgcctgtagtcccagctacttgggaggctgaggcaggagaatggtatgaacccgggaggcggagcttgcagtgagccgagatcacgccactgcactccagcctgggcgacagagcaagactcttgtctcaaaaaaaaaaaaaaattaagccaggcgcggtggctcacgccggtaatcctagcactttgggaggccaaggcgggcggataatgaggtcaggagtttgagaccagcctgaccaacatggtgaaaccccgtctctactaaaaataacaataattagtggggcatggtggcgcacgcctgtaatcccagctactcagcaggctgaggcaggagaatcgcttgaacctgggaggtggaggttgcagtgagccgaaatcgcgccactgcactccagcctgggcgacagagcgagactccgtctcaaaaaaacaaaaacaaaaacaaaaattaagccaggcgcagtggctcatgcctgtaatcccagcactttgggaagccgaggcgggcagatcatgaggtcaggagttcgagaccagcctggccaacatggtgaaaccggtctctactaaaaatacaaaaattagctaggtgtggtgatgggcgcctgtaatcccagctactcgggaggctgaggcagaagaatcgcttgaacccgggaggcggaggctgcagtgagccgagatcgcaccactgcactactccagccttggcgacagactgagactccgtctcaaacaaaacaaacaaacaaacagacaaaaaaagccaggcgtgatggtgggcgactacgactataatcccagctactcgggaggctgaggcaggagaattgcctgaacctgggaggcggaggttgcagtgagccgagatcgcgacactgcactccagcctgggctacagtgagactgtctcaaaaaaaaaaaaagaaaaaagaaaaaaggaaaaaagaagcgatgctaacacgcgccctctagcggctactgggggaacagaccgtggaggtgggaagcaaaggcaacagcagaggaccagggccatgacccgggactgaggaatggactgacacgtgttacccactcccattgcagcacttcagtaatgtccccaaacaagcacataggcagcggctagattcatctttttaatgacatcctaaaattcagaggaggggccagcgggacctctgggctcagcggctgtgaaggagggacccgcaacacccgctaaggcaggtaattgcaagaaggcactcgcgaggaggacttcaagcccctcttctatttcttcatataaaatcagggggatggggaaagctccaagggcgagggaagcagagagagtttctctcccagcctatggaataaggaagaggtgaggaaggggcgggtgctgggagcaagaaactgccaagtccaggacctgccctcacacagacacacacagcccgcacctgccctccctctaaaatctgcatccggggctgtaaggaagccccgtgttcaagcccccatctcttctcccttctagctggtacgaagttggtaatctgcagagaaagaatgaggaggggccatctcagaaatggggagaggggggccgggcacggtgactcacgcttataatcccagcactttgggaggtcgaggcaggtggatcacttgaggtcaggggttcgagaccagcctggccaacatggtgaaaccccatgtctattaaaaatacaaaaattagctgggtatgatggtgcacacctgtaatcccagctactagggaggctgaggcagaagaattgcttgaacccaggaggtggaggttgcagtgagctgagattgcgccactgcactccagcctgggcgacagagtgagattccatctcaaaaaagaaaagaaatggggaggggtgaaggaagagggacagcctcccacagcccctcaattcatcccctatcccagcactcatgatcaacaaggctaagaatggggctaaacacaggtactgtaaccatagaaacaaggcagtttccaggcagcagatggaggtgctatatgttcagccccttctccaaactcgcgaccaccctagaactgacgctgacaactgtccctgcttttttttcctttttttttttttttttttttgagccagggtctcactcttgcccaggatggagtgcagtggtgcaatcacagctcactacagcctcgacctcctgggctcaggcgatcctcccacctcagcctcctgagttgctgggactacaggtgtgcacatcacacctggctaatttttatattttttgtagtgaaggggttttgctgtgttgccaaggctggtctggaactcctgagctcaagcggtcctcccacctcagcctcccaaagtgctggaattacagatgtgagccaccacacccagccaactgcccccattttaaagacgtgcaaaccaaggcccagggtgccatgacaagaaggggcagtttgctttctttttcattttttgagacagggtttctgtcgaccaggcaggagtgcagtggcacgatctcagctcactgcaacctccacctcccgggttcaagcaattctgcctcagcttcctgagtagcttggattataggcatacaccaccacacccggctaatttttgtatttttagtagaaacagggtttcaccatgttggccaggttggtctcgaactcccggcctcaagagatccacccgccttggcctcccaaagtgctaggattacacacctgaaccatcacacctgacccttgttggttttctgagccagaatgtggtgaaagcctcgagtccctacccactgcctttccctcaccccattgtccccaggagctgggctgccttaccgccactctgggtgatgtagcgaacccagggcagggcctggtaaccacttttctcaatgatcttcatgtatcggacctggaagggaatgaaaagaggtggtccaggattgcaggagggaggaggccagggccagggagaaagagacggcttaggccaagcggctatgtggcacaggctgggatcgatgaggggatatcacatggtcttagggggatgaggtggcacaggcaacggaatggtgaatggctttggaggtggagaagggacagaagtgaacaagccggtggggaacaaggtggcacaggccgggggagagggagcacaggctgtgggcagataaaggtaacattgctctgggaaagaccaggcagccttcagaggagtgttgacacaggccaggggactgaggtgactcgagccaagggacaggagagaggggaacccaccgaagtcaaggggaggatcctccctgcctgcttctctcacctggatcccagagacggtgaagtaggggatctcaaacttgaccccgatggggggccggccctccacctcttccttttccacactggggaggccaaagtgggctcgcatcaagtactccttgcccccctgagggaacatgggggcatcaggtacacgagggtccgcctaccctcccgagaccttcctttcagcaacccctggagtcagatctgctcacagcccatttcacagacaggaaaataaaggctccttagcctgggcaacatattgagataccatgtctacaaaaagtttaaaaattagctgggtgcggtggaacatgcctgcagtttcagctacttgggaggctgaggcaggaagatcccttgagtctgggagtttgaggctgcagtgagccatgatctcaccactgcaccccaacctgggtgacagagactcaccagggaagattctgactgcaaaacccaatcagggtttttttctttttttaactaccatgtcctgttttacaggcactgatgatccacctctcccaagatcatggggacaaaccaaaacctctagtagccaagggatgtgggtcacctcatcctgcccatttcacagacaggcaaactgagcctccttaagtggaaatgggtttcccaaacccacccagctcagcaaagcaatagtgaggaaggtgaacccagggctggtttcctcaagacattggcagggggatatttaaatccacacacttcccgtcatggaagtttacacgtctgtgaaatagactggcctggtttcaagcttgatcacttgcatacatacgtacctctctgatttacttgtatttcttttttctttttttttctttttttttctttttttttttttttgagatggagtcttactctgtcgcccaggctggagtgtagtggtgcggtcttggctcactgcaagctccgcctcccaggttcacgccattctcctgcctcagcctcccggtagctgggactacaggcgcccgccaccacgcccagctaattttttttttttttgtatttttagtagagacggggtttcacagtgttagccaggatggtctcgatctcctgacctcgtaatctgcccgcctcagcctcccaaagtgctgggaattacaggcgtgagccactgcgcctggccttgtatttcttttttctaagtttttttttttttcttgagacagagtttcactctgtcacccaggctggagtgcggtggcgtgatctcaactcactgcaacctccgcctcccgggttcaagtgattctcctgcctcagcctcctgagtagctggtactacaggcgcacacccccatgcccggctaattttttttttttttttttttttgaaatggagtctcgctctgtcacccaggctggagtgcagtggcgtgatctctgctcactgcaagctccacctcccgagttcaggccattctcctgcctcagcctcccaaatagctgggactacaggcgcctgcaaccacgcccggctaattttttgtatttttagtagagatggggtttcaccatgttagccaggatggtctcgatctcctgacctcgtgatccgcccacctcggcctcccaaagtgctgggattacaggcgtgagccaccgtgccctgccctaatttttgtatttttagtagagacgggttttcaccatgttggccaggctggtcttgaacttctgacctcaggtgatctgcccgcttcagcctcccaaagtgctgggattacaggtatgagccaccatgtctggccttttaatcttttttttttttttttgagacggagtctcgttctgttgcccaggctggagtgtgcagtggcacaatctcagctcactgcaacctctgcctcccgggttcaagcaattctcctgcctcagtgtcccgagtggctgggattacaggcatgcgccaccacacccagctaatttttgtacttttactagagacggatgttagccgtctctatgttagccaggctgggatttcaggcgtgagccactgcgcccagctcctcttaatatttttatagaggcagggtctcactgtgttccccaggctggtctccagctcctgggttcaagcgatctgcccgtgtcagcctctcaaagtactggcattccagtcatgagccatcacacctgactgggtctctgatttgttctctgccttgttctcatggctcctgggcagcccccacactactccagtcccctccacccccagatcccccgccagtccctggtacttaccgggaaagacttaatactccaaatcacgacgtttctctccggcacatacttggcgctgcccacactggtcttgaatctgggggagtcggcatcgctgggtacaggcacagatatctccacaccgttggccactgactgtttcttaaactgccccttggcctgtcaggggagcgagcatggggcacgaagaattcgcttgctcatccttcaaatatttaccaagcccttttttttttttttttttttttttttttgagacggagtctcactctgtcgcccaggctggagtgcagtggcgcgatctcggctggctgtaagctccgcctcccaggttcacgccattctcctacctcagcctcctgagcagctgggactacaggcacccgccagcacgcccagctaattttttttgtattcttagtagagacggggtttcagcatgttagccaggatgttctcgatctcctgacctcgtgatccgcccaccccggcctctcaaagtgctgggattacaggcgtgagccaccatgcttggcctttttttttttttttttttttagacggagtctctctctgtcacccaggctggagtgcagtggcacaatctccgctcacggcaacctccgcctcctgggttcaagcaattctcctgcctcagcctcccaagtaggtgggattacaggcatgtgccaccacgccctgctaattttgtatttttagtagagacagcgtttctccatgttggtcaggctggtctggaacgcctgacctcaggtgatcctactgcctccgcctcccaacatgctgggattacaggtatgaaccactgcacccagcctgaaggggtcattttgaatcaggcaaaggtgtatggtgctgtccacatggaaggcaccaagaacagggcttctcgagcctcatgggtgtgggcctgagttctaacagttgttggctgtgtatctgcaggcaaatgccttaacttctgtgtgcctcagtttcctcatctgtaaaatggacaggataagggtccccaccttaggattgtggaggcctgggctgagagggcatatgaaaggcttgttgaaaaaagccgggggtggtgggccacacctgtaatcccagcacttggggagatggaggcaggcgtggcggcaggagcctgtaatcccagctgctcgggaggctgaggtaggagaatggcatgaacccaggaggcagaggttgcggtgagctgagatcacaccactgcactccagcccgagtgacagagggagactctttctcaaaaaacaaacgaacaaacaaacaaaaaaacccttcagtccatcacaggagagttattattttatttgataacagattttttttttcttttttctttttggagatggggtctagctctgtcatccaggctagagtccttgtctcactacaacctcctcctcctggactcaagcaatcctcccacctcagcctcccaactaactggcactacaggcactcaccactttaccaggctaatttttgtattttttgtagaaacagggtttcgccctgttgcccaggctggtctcaaagtcctgggcttaagtgatctaaccaccccggcctcccaaagtgctgggattacaggtgtgagccaccgcacccacccgagatcatgcattgttaataagcattcccccaaggcccaccttgaccatgatctccacgcggctgtgggagaacttctcaatgacagactcaatccagatcagtggcttgacctgtgggaagaagaaggggagagttcttggagactccatgttgactctcttctttttttttttttttttttctttctttgagacagagtctcgcttcttcgcccaggctgaagtgccatggcgtgatcttggctcactgcaacctgcacctcctggactaaagcaattctcggccgggagcggtggctcacgcctgtaatcccagcactttgggaggccaaggtgggcggatcacgaggtcaggagatcgagaccatcctggctaacacggcgaaaccccgtctctactaaaaatgcaaaaaattagctggacacggtggcatgcgcctatagtcccagctactcgggacgctgaggcaggagaatggcgtgaacctgggaggcggagcttgcagtgagccgagatagcgctactgcactccagcctgggtgaaagagccagactccgtctcaaaaaaataataataataaaaattaaaaaaaacaaataaagcaattctcctgcctcagcctccccagtacctgggattacagcatgtgccaccatgcccagctaatttttgtatttttagtagagacagggcttcaccctgttggccaggctggtctcgaactcctgtcctcaagtgatccacccgactcagcctccaaaattgttgggattacaggcgtgagccactgcgctgggcccagggtcgctcttcagcctaccccaacctactccacccagatggggctggaccctgcctcacctgggtgctgaggcggtatgacatgagctcaaagtcaccatcaggcgggatgaaggagatggtgcggtcgttgtcaaagcgagagagccgcacgcactggtggaattttacatcctccagctctactgatttgttcttgctgcctgaaactcagagtggagagtggagagtgaccctgggaaccaggaaaggatccctatccccacctttcctgccgaccactgtcacctatttcacatatggggaaactggggcccagagagaatgagcaaaaactggcacagtagagctggaatctgaacctagtatctgtacaggatctggcttggtttttttttttttttttttttttttgagacagagtttcactcttgttgcccagactggagtgcgatggcacgtcttggctcaccgcaacctccacctcccgagttcaagccattctcctgcctcagcctactgagtagataggattacaggaatgtgctaccacccccggctaattttgtatttttagtagagacggggtttctccatgttggtcaggctggtctcaaattcccaacctcaggtgatcctccctcctcggcctcccaaagtgctgggattacaggcgtgagccactgtatacccggcagtgtctggcttttaaatatgatgctgaggcctggcgtggtggctcacgcctgtaatccccgaactatgggaggctgagatgggcggatcacaaggtaaagagatcgagaccatcctggccaacatggtgaaacctcgtctccactaaaaatacaaaaaaaattagctgggcgtggtggctggtgcctatagtcccagctactcaggaggctgaggcaggagaatagcttgaacccaggaggcggaggttgcagtgagctgagatcatgccactgcactccagccgggtgacggagcgagactccatcttaaatcaatcaatcagtcaataaataagatgctgagccaggcacagtagttcacacctgtaatcctagcactttgggaggattgcttgaggccaggagtttagaccagactgggcaacatagcgagacccccgtctctataaaaaatttaaaaagtaggtggtccatgcctgtagtcccagctactcgagaggctgaggtgggaggatcagttgagcctcggaggtcaaggctgcaatgagctatgatcacaccactgcactccagcctgggtgacagagcgagaccccatcccaaaataaataaataaataagatgctattctgtctcctcctcccagtaggatgtcatctctgtaagaacgcgggtttgtctttttcttcactgctgtgtcctcagagcctaaaactgcacctggcacccaatagtcgctcaatcatgaaacagcctttgcagtcagccaatggctgcaatactggccgtgatcagcagatggtgagcgagcgcttatttcaaaacgggctgcgattctcttaagtccccacgtggggcgggtttgcgactcccctgtgcatttctcagaagaaaggtcccctaaatgcttacggccagtgagctcgaagagcacgcggtcattgaggcccagccgcagctctggcattcctgacagaaacaccttgagcttgatggtaccgacgatttcgctcagaaggacgctgccgttggcattgacctgagggaggacgttgggtatagttagcaggcatcaaactccgtctcctgcagccaggccgtggaaggggtgccggggaggtgtgcaggctcaccagcaggttgacagactctatgacatcaatgaagacctcgttcttcttatacttgataccctcggagcgccaggacacagcgttggtgacagtgggtggcacccgtgacttgcccgtctccagcttgttgctctgctgagtgatgtacctggagggagggcggcagggacaagcagctggacccagggacacctccgtggacctcctccagttccttacacccacagtccagcccatggctgcctccaggggtccactcactcctgcaggatcttgctgtcggtggtctgcgggaagccaaagtccatgagctcgtccagcaactcgtagacgatgacaaagttgtcccggatgctctcctcctccagctccttgaagtattcgcagaatacctgggggttggaggagagagagacccacaaaagtgtggctatgggttgggcatagtagctcatgcctgtaaccccagcaccttgggaggccaaggcacgaggatcacttaaggtcatgagttcaagaccagcctgggcaatatagtgaacccctatctcgttttttcttttttcttttttttttcgagacagtctcgcactgtcacccaggctggagtgcagtggcactatctcggctcactgcaactcctgcctccggggttcaagcgattctcctgcctcagccttctgagtagctgggactacaggcacgcactaccagggccagctaatatttgtatttttagtagagacggggtttcacaatgttggccaggatgatctcgatctcttgatctcgtaatccgcccactttggcttcccaaagtgctgggattatggcatgagccaccggtgcccggccatgagcccctatctctaacaacaacaacaaaaattttaataggagttcgaggctgcagtgagccatgaggatgctactgcactccagcctgcgtaacagaataagcccctgtctcaaaaagaaaaaaggccgggcatggtggctcatgcctgtaatcccaacaatgggaggccaagggaggcagctcacttgaggtcaggagtttgagaccagctggccaacatggcaaaaccccgtctatactaaaaatacaaaaattagccaggcatggtggcacctgcctgtaattgcagctactagggaggctgaagcaggagaatcacttgaacccaggaggtagaggttgcagtgagctgagattgtgccactgcactccagcctgggcaacaaagtgagaccctgtctcaaaagaaaaaacaaaaaagaaaaaagaaaaagtgtactgaatgcttgaaaaattaggcaaaaaagggcaggtatggtggcttctttttttttttttgagactaagtctcacagtgttgcccaggctggagtgcagtggcgagatcttggctcaccacaacctctgccttccaggttcaggtgattctcctgcctcaaccttccccgtagctgggattacaggcaggtgccaccatacccggctaatttttgtatttttagtagagaaggggtttctgcatgttggccagcctggtctcgaactcctggcctcaagcaatccgcccaccttagcctcccaaagtactgggattacaggcatgagccactgtgcctggcctttttctttttttttttaagcacagagacaagaagtcacttgctcaaggtcacacagtgaggaagcagggaagctgggattggatgccaagtccttgggcttagctgagccgtatgctctctgagacattcttggtccctgtcctttagggagagatgacttcataagcagctgatgagatgcagagtgatggggctttgatggcggatgcacagagactcaaacaaggccccagggaaggggtgagcgtggtggctcccatgctttgggaggccaaggcagtaggattgcttcaatccagaagttctagaccagcctgggcaatatagcaagaccccatctctaccagaaaaaaaaaaaagggaagacccagggagatctgggaaggcttcctatcagaaaaggatcttgaatcttgaaagaggcgggcaagagggatagacggatagaccagttagccaatgggaggctagtacctacctctattgtcttatacaggaaggagtacaccagggaggcattggcattcttcgatgtggtggccaccactggggcagcaaggttaaggaaaaggtgccatttatggagaagtaaatggaatacagaccccgaacctccaccctgtcccttgccaccaccctcatctctacctgcccctgccccccagcctaagccacagagatgtgcggtgcaactcctgtcctcagcccaccctctcttggcctgagctgccaccatcgccgacagcccccacacccacctccagggacaccacgtggggtggatacagtagaggttgctgtgtttgatccataggaagtggacctggccgtggctcagcagcggggccagggcgccttcctcctcccgctgtaccagcaaaggcatgaagtgctcaatcttgctcatggccacatcgcccttgtagttgcggctgatcaatggctgagggtggaaggaaaggacctggtcaccaccagcatccaagaacctaccacgctgaggaggcacagtgcccggttctgaccctacttcctagctgaggggcttgggcaaggctctgcctccttgtgcctgtttcctgctctgtaaaatgggagtgtgatgacaacagctaatgggtctagggccctcactaagtgccaggctgtgttttattaaagggtaggcgatggctggacgcagtggctcacgcctgtgatcccagcattttgggaggccgaggcgggtggatcatgaggtcaagagatcgagaccatcctggccaacatggtgaaaccccgtctttactaaaaatacaaaaaattagccgggcgtgatggcgtgtatctatagtcccagctactcggggtgctgaggcaggaggatcacttgaacctgggaggcggagattgcagtgagccgagatcgtgccactgcactccagcctggcgacagagcaagactccatctcaaaagaagaaagagagaaagaaagaaagaaagaaagtaaagaaggaagggaggaagggaaggagggagggtaggagggaaggaaggaaggaaggaaggaaggtaggcaggcaggctggctactaaaaaaagagtagatgtttactaacttattagttcttgccacaaccctgtggggtagatgttatcatcatctccatttcacacaggagaagtgaggttagaaaccatgtccactggaagcatatggaaactggggattgatctaaggcatcctgggtccagaatccctgctgttgccccagacttcatttgcaccaaagtgggattatttaaaaaaacaacaacaacaaaaaaaaaaaacaaagaagaggccaggtgcaatgactcactcatgaagaccaaggcaggaggatcccttgaggccaggagtttgagaccagctttggcaacatagcgggatccctctacaaaaaatttcaagaattagctgagcatggtggcctgcacctctgtagtcacagctactctggaggctaaggcagaagaatcaattgagcctaggaggtcgagactacagtgagctgtggtcatactactgcactccagcccgagcaacagagtgagaccctgtcaaaaaaagaaagaagaaaagaaagaaagaaagaaggaaagaaggaaagaaggaaagaaagaaagaagaaaaaaagaaagaaagaaagaaagaaagaaagaaagaaagaaagaaagaaagaaagaaagaaagaaagaaagaaagatgacagttcatatgattgtgcctggtagtcaggaagacacccataatagtaaacacttctgtctggacacggtggctcacgcctttaatcccagcactttgggaggctaaggcgggtggatcatgaggtcaagagttcgagaccatccaggccaacatgatgaaaccccgtctctactaaaaatacaaaaattagcttggtgtgctggcgcatgaccgtaatcccagctactcaggaggctaaggcatgagaatcacttgaacccaggaggtgaaggttgctgtgagctgagatcacaccagcctggtgacagagcgagactccatctccaaaaaaaaaaaaaattagttaaccacttcctaaggttgttttgtccagtgtctgaacagggaggacccatggcaggttctcaaacatcttagctctcactattaatattaatgggaatattattttcaccaccactcttattttggctattaaatgacaagacaggctgactgcagtggctcacacctgtcatccgaacactttgggaggctgaagcagggggatagctggggaccaggagttcaagaccatcctggacaacatagcaagactccatctgtacaaaaaaataaaaataaaaaataggccgggtgcggccgggcgcagtggctcatgtctgtaatcccagcactttgggaggccgaggtgggcggatcacgaggtcaagagattgagaccatcctgcccaacatggtgaaaccccatctctactaaagatacaaaaaattagccgggcgtgatggtgcgcgcctgtaatcccagctactcaggaggctgaggaaggagaatcacttgaacctgggaggtggaggttgcagtgagccaagatcatgccattgcactccagcctgggtgacaaggcgagactctgtcttgaaaaaaaaaaaaaatacaaaaattagccaggcatggtggcatgcacctgtagtcccagctactcgggaggctgaggcaggagaattgcttcaacccgggaggtggaggttgcagtgagccaagatggagccactgcactccagcctgggtgacagagcaagactctatttaaaaaaaaaaaaaaaaaaaaattaaaaatagccgggcatggaggggtcagcccgcagccccagatattcaggagtttgagagcagctttggcaacatagcgggatccctctacaaaaaaatgtcaagaattagccaggcatggtggcctgcacctgtgtagtcacagctactccggagactgaggcaggaggatcgcttgagcccaggaattccaggctgcagtgagctatgatcgcaccactgcactcaagcctgggagacagcaagagaccctgtctccaaaataaaaaaagacaagaggaataaaaggacttcaggaagaggcaaggcagccacagatggggggagttagaggcccctgttccagttgccttccccaggtattaacactgtggatgccgacagtgatggagataatttcaatttgctgagtccctaatatttccagaaaggccactatgctaagtagtttacacgcagcgagttgtattaattctcattgggtggggacctctgttgctcccatttttacatacagagaaactgaggccctaggaggcgaaccccttggcctcaggcacaaggcgagtggatgctggaggtgggattcccagggattgcagggggagggggtgttcccagacctcttcctggcccgcgcggaggggtcgcccctgaatccctgggagcgagacctcacctgtccgtctcccaactcctcatgcccagcctcaccttgcccttaacgtccagaatgaagacagccgaggcggacatggtggcggccgaaggacttaggagtcggggagggagcgccgggaggcgatggcggcgccgcttccttcttcctgcggaagcgcctgcgcccaggtgagagcccaggtgtgtgcgtcttaaaggggaggcggccaggtgagcagcgctgtcggccaacttgaagatggctgcggggccgggagaggtactgcgacttcagatgggtctgctgccccccttcactttccctagccacccaggagtaatgacgggtggagaccccaaaccaatcaaccatccttccatccattcattcatccttcctttcattcatctatccatccattcgtccatccatccattcattcttgcattcattaatccatccacgcatccactcatttagccattcattaatccatcttccatcgattcattgatccatccttccattcgtcatccatttcttcatccatttttgcattcatttatttgttcgtctatccattatccattcatccatccatttattcatccattcattcatcccttcttgcattcattcatttattcatctttccattcatccatccattcatccattctaacattcatcaatttattcatctatccatccatccatccatccgttcatccattcttgcatcattaatttattcatctatccattcatcaatccatccatccatccattcttgcattcattaatttattcatctatccattcatccacccatctatccattcattcatcctctcattgattcatccatccattcaccttctttctcctctgtctcacccacacacgtcagcccccatacagcagggactttgtcttgttcatgtttatgtccctagtgctcagcactgggtgctcaaaatttgcccaattcattcattcactcattcatataataattttcactggtgaattttactgactgaatttgaaatattcattcactcagtaacaggaactgtggatataattccgagcaggacaaatgtacttgcttttattattcttacaaatttactcttattcatttcaaataaaaaatttatttttttttgttttttgaaatggagtctcactctgttgcccatgctggagtgcagtggaatgattttggctcactgcaacctccacctcccaggttcaagcaatcctcctgcctcagcacccctagtagctgggattacaggcaagcgccaccatgcccagctaatttttttttttttttagactccaggctggagtgcagtggcatgatctctactcactacaacctccgcttcccgggttcaagggattctgctgcctcagcctcccaagtagctgggattacaggtatgcgccatcacgcctggctaattttgtatttttaatagagatggggtttcaccatgttggccaggctggtctcgaactcccgacctcaggtgatccacccgcctcagcgtcccaaagggctgagattacaggcgtgagccaccgcacccagccaaaaaactttttttgtagagacagggtctcactctgtaccctagactggactgcagtgatgcaatcatggctcactacagcctcaacttcctgggctcaagccatcctcctgcctcagcctccctagtaactggaactacaggcacaaaccgccacacccagctaattttttttgagacagaattttgctctagtttaccaggctagagtgcagtgatgtgatctcggctcgctgaaacctatgcctcctaggttcaagcaattctcctgcctcagcctcccgagtagctgagattacaggcatgcgccaccatgcccggctactttttttgtatttttagtagagacagggtttctccatgttggtcaggctggtcttgaactcacgacctcaggtgatccacccgccttggcctcccaaattgctaggatgacagatgtgagccactgcgcctggccacaactagctaatttttttttttttttttaatttggagtctcgtcctgttgcccaggctggagtgcaatggcacaatctcggctcactgcaacctctgcctcccaggctcaagcgattctgctgcctcagcctcccaagtaactgggattacaggcgtgcaccaccaagcccagctaattttttgtatctttagtagagatggggtttcaccatgttggccaggctggtctcgaactcctgacctcgtgatccatctgccttggcctcccaaaatgctgggattacaggcgtgagccactgcgcctggcccacacctagctgatttttttttttttttttgagacagagtctggctttgtcgcccaggatggagtgcagtggcgcaatctctgctcactgcaacctctgcctcccagcttcaagcaattctctgcctcagactcccaagtagctgggattacaggcgcctgccaccacgcccggctaattttttttttgtatttttagtagagacgggggtttcaccatcttggccaggctggtcttgaactcctgacctcgtgatccacccgcctcagcctcccaaaatgctgggatgacaggtgtgagccaccgcgccaggccaggcccacctagctaatttttttttttctttgagatggagtctcgctctgttacccaggctggagtgcaatggcgcgatctcaactcactgcaagctccgcctcccaggttcacaccattctcctgcctcagcctcccgagtggctgggactacaggcgcctgccaacacgcctggctaactttttgtacttttagtaaagacagggtttcaccatgttagccaggatggtctggatctcctgacctcgtgatccgcccgcttcggcctcccaaagtgctgggactacaggtgtaagccaccgcacccggcccgacctagctaatttttacattttttgtagagatggtgtatcggtatgttgcccaggctggtctcaaactcctgggctcaagcgatcctccccccttggccctccaaagtactgggattacaggcgtagtctgagccactgtgcctggtttgtgcagattaaatgagttattctgtgcaacgtggtgttggaagggaacttggatgtagctgactgtcaaccatgtcgctgagaaggaggaggatgaagatgatgatctggatgatgatgtagcagttgagagcacagatgctgggtttgatttttgataccaccacacactggctataaggcatgggctggtgaatgcacctgctgtgcctcagtctcctcttatgttaaatgggtataacagccatggtgccctctcctgcagttgcatagccaaatacctggcatggcccctggctccatgcatgtttcgtgcacaccagctgctgcagacccagattccacccctggactttccttttttttttcttttgaaatggagtctcagtctgtcgccaggctggagtgcagtggtgcgatctcagctcactgcaacctctgtctcctgggttcaagcgattctcctgcctcagcctcccaagtagctgggactacaggtgcactccaccatgcccagctaatttttgtatttttattagagatggggtttcaccatgttgaccaggatgctgtcgaactcttgacctcgtgatccgcccacctcagcctcccaaagtgcggtagttttgaggacagggcagaaggaaagggaaagtaaacctcagccttgcttagaaccaccttgcttggctgagggagggagatgtcctgcagggcctgcagggaacaagactcagcctacccagacctcacttgtcctttccccaaaccctgcccagccctttatcagcccctgtaggtggggacttagagaacagcagctatcaggatcatccacttgcctctccacctgaaattaacatcaacattgacagcagcactgcactttaattaaaacattatcatctgggccaggagcaatgtttcatgcctgtatcccagcactttgggaggccaaggtggacagagcacctgaggccaggagtttgagaccagcctggccaacatggcgaaaccctgtctccactaaaaatacaaaaattagccgggcgtggtgacgcatgcctgtaattccagctacttgggaggctgaggcagaagaatcacttgaactggggaggcggaggttatagtgagccgagatggcaccactgcactccagcctgggtgacagagtgagactccgtctcaagaaaataaataaatagaatgaaaaataaaaagttatcatctggcacaagtctccttcgtgccatcttataaaggtagaagcagggacacagagaagtgaaggcacctgcccaagcccacggccccagagccaggaggcagttgacccagaattcgaatctgagtcccgggatttaagaatctggtcccagcctgcttccgcctgctttgctatattgctggatgcaaatattactattagtaacactaactctggcttaaatggtgctcaccataagtgagggtggccctaaatgtcgcccatgcaggaatcctcaagacagccccttgaattacagaagcctattttttttttttatttatttgagacaaggacttgctttgtcgcccaggctgcggtgcagtggtgcaaacacggctcactgcagcctcaaccttctgaactcaagagatcctctcacctaggcctctccagtagctgggactacaggtgagcaacaccactcccagctaatttttaaattttttttttttttttttttgagacagagtcttgctctgtcgcccaggctggagtgcagtggcgcaatctcggctcactgcaacttccgcctcacaggttcacacccttctcctgcctcagcctccggagtagctgggactacaggcatccgccatcaagcccggctaatttttttgtatttttagtagagacggggtttcaccgtgttagccaagatggtctcgatctcctgacctcgtgatccgcacacctcagcctctcaaagtgctgggattacaggcgtgagccaccgtgcctgcccaatttttaaattttttgtagagatggggtctcgctacgttgctcaagctggtcttgagcttctggcctcaagctgtcctcccacctcagccttccaaaacactgagattacagacacgagtcacctcccccaactctattatcttcatttgacagatagggaaactgaggccttgagagagtaagtgatttgtacaatgtcatccagtcagaagaagcagagctgggatttgagctctggaaagcacaaggtttttttgttttgttttgttttttgttttgagacagagtctcgctctgtcgcccaggctggagtggagtggtgtgatcttgactcactgcaacctccgcctcacgggttcgagtgattcttctgtctcagcttcccaagtagctgggaccacaggtttgtgccactatgcctggctaatttttgtatttttagtagagatgggggttcgccattttggccaggacggtctcaaactcctgaccttgtgatccgcccgcattgcacgttggcctcccaaagtgctgggattacaggtttgagccactgcacccggacttttttgttttttgagatggaatttcactcttgttgcccaggctggagggcaatggtgcaaccttggctcaccataccctccgcctcccaggttcaagtgattctcctgcctcagcctcccaagtagctgggattacaggcatgcaccaccatgcctggctaattttgtatttttagtacagacaaggtttctccatgttggtcaggctggtctcaaactcccgacctcaggtgatccacccacctcagcctcccaaagtgctgggattacaggggtgagccatcgcacctggccctgattattattattattattattattatttttgaggcagggtctctgtcacccaggctggagtgcagtggtgtgatctcagctcactgcaacctccacctccccaggttcaagcaatcaagcaattctcccaccccagcctcctgcacagctgggaccacaggtgcgtgaccaccacatccagctaatttttatactttttggtacagacaggtttcacaatgtcgcccaggctggtctccaacttgtggacttaagtggtccacccgcctcggcctcccacagtgctgggattataggcgtgagccatctcgcccagcctaaagcccaagactttatgttgcttctgcccaaaggaggggggtggtccttcatgctcccagcaactgcctgctgagaaggtcacctagggggatgcagtcactgctaggccctcaccccagcctagacattgctgaacctcaaaataactcgtctcctggcagccgggcgtggtggctcacgcctgtaatcctagcacttcgggaggctgaggtgggtggatcacctgaggtcaggagtttgagaccagcctggccaaaatggtgaaaccctgtctggactaaaaatacagaattagccgggggtggtagcacatgcctgtaatcccacctactcaggagactgaggcaggagaatcacttgaaactgggaggcagaggttgcagtgagccaagattgcgccattgcactccagcctggggcaatagagtgagactctgtctcaaaaacaacaacaacaacaaaatgaagaactcatctcctggggccctgagatgttttcaggcagtaagcagaacccgaaagcctgggcccagtgccctggaatctgaaactccaggcttgtttggcatgaaaaattcatgagcccaaaagcttacttggggtcagagaacagagcagctctgtgtgctggctctgcctgccccgcctgccccacctcagtggcggcctcccccatccccctgaggctgtggccttgtcctagttccttctggatgcctggagcctcctccagcctctcccagggaccacgcctctaggccctgtccacaatcccttctccacaccactaaagagatctctctgaaactcacaattattttttgactctcactctcacatcctctatggccccccattgccctccaaccacccccacctggcacagtcagacacctgctgacctctgccacaggacaccacctgaacctgctgtcccagacaccctaactgcccgaatttcagttcctctcctgctgtctcaagccatcctcccacctcagcctcccaagtagctgagactatagacacgtgccaccacagctggccaccttagccattttgaagtgcacagttcggtggcattaagcacattaatggccatgcaaccgtcaccaccatccatctccagaactttctcatcttcccaaaggaaaacttctccctatgaaacactccttctccctctcccaacccctggcacccactcttcttcttcttcttcttctccttttccttctcctcctcctccttcttcttcttcttttcttttttttatttattttgagatggagtctcaccgtcaccgaggcttgagtgcagtggcacaatctcggctcactgcagcctccatctcctaggttcaagcagttctcctgcctcagcctcctgagtagctgggattacaggcgccccccaccacgcccagctaattttatttttttatattttatttattcatttacttttattattttattattatttttttttgagacagagtctcgctctgttgcccaggctggagtgcagtggcacgatctcagctccctgcaagctctgcctcccgggttcatgccattctcctgcctcagcctcccgagtagctgggactacaggtgcctgccaccacacccggctaatttttgtatttttagtagaggcagggtttcgccatattggccaggctggtctcttggccaagctggtctggaactcctgacctggagatgtgcctgcctcagcctcccaaagtgctgggattataggcgtgagccgccgcgcccagcttttttttcttttttttttgagacggattctcactttgtcgcccaggggctggagtgcagtggcgcaatctcagctaattgcaacctcctccttctcctagttcaagtgattctcctgcctcagcctcccaagtagctgggattacaggcatctgccaccacgctgggctaatttttgtatttttggtagagactgggtttcgccatgttgactaggctggtctcaaactcctgacctcaagtgatccacccatctcagcctcccaatgtgctgggattacaagtgtaagccaccatgcccagctactcaggagtctgaggtgggaggatcactggagcccagaagattgaggctgcagtgagctatggttgcaccactgcactccagcctcggtgacaaagcaagaacctatcttaagaaaatactgtgctgagccagttcctgagaaaacaaaatagaaaacaaaactaaagaaaaggcaaaagttcctcccagcagagatgtgagagaaaaagaaaaaaaaagtcccctgtgacacccccataccccaatcttcgtccctctcataaccactggctgattcagatctttttcagctgggttacatgcaggggggtgtgtgtgtgtgtttgtgtgtgtgtgtgtgtgtgtgtgtgtgtgtgcgcgtgttgccctctttctctctctttctcccataccatataagactatacaacttgtggatgggcacagtggctctcacctgtaatcccagaactttgggaggcagaggcgggtggggcacttgaggccaagagttcaagagcagcctgggcaacatggcaaaaaatctgtctctactaaaaatataaaaactggccaggtgtggtggctcacgcctgtaatccctgcactttggaggctaaggcaggtgaatcacctgaggtcaggagtttgagacaagcctggccaacatgataaaatcctgtctctactaaaaatacaaaaaattagccaggtatgctggcggacacctgtaatcccagctactcgggaggctgaggcaggagaattgcttgaacccaggaggcagaggttgcagtgagccgagatcatgccactgcactcgagcctgggtgacagaacaagaatctgtctcaaaaacaaaacaaaacaaaacaaacaagcaacaacaactatatatatatatatatatatgtatatagactaagctgggcatggtggtgcgtacctgaaatcccagctactccagaggctgaggcacacaaatcacttgaacccaagagaaggaggtttcagtgagctgagctcgcaccactgcactccagcctgggcgacagagagagactctgtcttaaataaaaaaaaaaaaatacaacttgctattatcactcaacaatatgacctggacgctactccggaaagcatgtggttgaaggggaaggaagtgtgtcttgggtgtaaagtcggactccctgggttcagatccttgcagagccacgggctcattatgttactgtgggtaaattacttcacctctctgggtcactttccccaattggaaaatgattataatgatttaatacagagtgcttgggccagacgcggtgtctcacgcctgtaatcccagcactttgggaggccgaggcggtggatcatgaggtcaggagattgacaccatcatggctaagacagtgaaacccgttcttcactaaaaatacaaaaaactagctgagcgtggtggtgggtgctgtaatcccagctactcagaaggctgaggcaggagaattgcttgaacccgggaggcagatggtgcagtgagctgagatcacgccactgcactccagcttggcgacagagtgagactccatctcaaaaactaaaacaaacaacaacaactatatacacacacacacacacacatacacacacagagagcactttactgggtgagccaagatcgcgccactgccctccagcagccttggttcaaaaaaaaaaggtgcttggccagcatggtggctcatgcttgtaatcccagcacttcaagaggccaagatgggcagatcgattgaggctaatgagacctggtctctatttcaaaaaaaagaaaaagagttaaaaaaatatataaagcatttaataccttgtctgacactgactaagctttctataaacattcactctttctttccttttttttttttttgagaccgagtctcgttctgtcacccaggctggtgtgcaatggtgcactcttggatcactgcaacctctgactcccaggttcaagtgattctcctgcttcagcctcccaagtagctgggattacatgcatgtgccaccacactcggctaattttgtatttttagtaaagacgggatttctccatgttggtcgggctggtctcgaactcccgacctcaggtgatccgcccgcctcggcctcccaaagtgctgggattacaggtgagagccactgcgtctggccttagagacagattttcatcgtgttgtccaggctaatcttgaactcctgtcctcaagtgaccctcctgcctcccagagtgctgggatcacagatgtgagccaccactcctggctgtaaacagtcactcttattataatctgcaggaccaccaccttttttcttaaactattttaaaaattctcattttgaaatgtaacttttttatttattatgtatacaaacacacatatatatttgcatcataaatgttattcccaatatgggacagattcctttcaacccccaggtgaatcacatggtaccctggaaagacctaggaagccctccctcccaccatctccagggaggtagtgagaacggcaggtgctggggactgggaaggctttggagtttcccagcctacctcttctccctttctcaacaaaggatacctgttccctattattccccttatccactcttcccttttttaaaaaaaacccacaaaaccatcattagtaaaaaaacaaacaaaaccccttcaagtattgggagttaggggtcctgggctgggacttggagttacaggtcaccaaggaagagggaagggaagagaaggaggggctgtcacttactactgctggctttcttccttgctgcatgctatggcaactgtgtgtcgacctcctttgctggcaactgcacgtatgggaccactgagcccggaatgaaacagtcctttttaaaaaactttttttgagacagagtctcgctctgtcacccaggctggagtgcagtggcatgatttcagctcactgcagcctccacctcccgggttccagcaactctcctgcctcagcttcccgagtagctgtgaatacaggcgcccgccaccacatccggctaagttttgtattttagtagagatggggttttgccatgttggccaggctggtctcaaactcctgacctcaggtgatccacctgccttggcctcccaaagtgctggggttacaggtgtgagccactgcacccagcctagaagttcttcactgataaaatgtgaggatatttctcaaggtgtgtgatactgatgtcagctcatttgatgttgagatactgatccaccgaatggagggtgccacagatgttcaggtctttcttgagttccatgaccacattcatgcccacaagggacttgaaaaaaggaatagaagagcatgatgctggcgacctgaccaggaagagcaacacatattttattttatttatttatttatttgagatgctgtctcactctttcacccaggccggagtgcagtggtgcaatcttggctcactgcgacctctgcctcccggggtcaagcaattctctgcctcagcctcctgaggagctgggattacaggcgcccgccgccacgcccgtctaatttttttttttttttgtatttttagtagggaccaggtttcaccaagttagtcaagctggtcttgaactcctgaccttgtgatccactcaactcagcttcccaaagtgctgggattacaggcgtgagccaccgtgccgggccagcaacacatattttaaaagggcagaagtcggttgggcacagcggcttacacctgtaatccctgcactttgggaggctgaggttggtggatcacctgagatcaggagttcgagaccagcctgggcaacatggcgaaaccccgtctctactaaaatacaaaaattgccactgtactccagcttgggcaacagagcaagattctgtctcagaaaaaaaaggcaggcagagtacgggggagaaggtcaagtattcacaaactaaactaagctatgtaactacaattctgtttccagtgcccagaagctgctcctatcatcccagtagttattactaccccaaaagtcaaccactgatatatgttctgttactataggttgattagctatgcctgttcttgaacttcagaaaaaagtgtgtggtttctttcacacaacattatgctttttggggagagattcatccatatttttgcctgtatcaatagtttattcctggaccaggcgctgtggctcacacctgtaatctcagcactctaggaggctgaggcagaaggatcacttgagaccagcctgggcacccatagggagaccctcatctccacaaaaatttaaaaaattagccgagtatgtccaggtgcggtggctcatgcctataatcccagcacttttggaggctgaggggggcggatcacctgaggtcgggagttccagaccagcccgaccaacatagagaaaccccgtctctactaaaaatacaaaattagccaggcgtggtggtgcatgcctgtaatcccggctactcagagactaaggcaggagaatcacttgaacttgggagacggaggttgcggtgagctgagatcacaccattgcaccattgcactccagcctgagcaacaagagtgaaactttgtcaaaaaaagaaagaaagaaagaaattagccaggcatgatagtgtgtgcctgtagtcccagcaacgggaggctgaggcaggaggatcacttgagctgaggaggtcagggcttcagtcagctatgactgcaccatcgcaatccagcctgggcaatacagcaagatcctgtccctaaaaaaagaaagaagaaaacattcattcctcatcactaaggagaatcccatggtatgggtgaaacccaccatggtttgcttcaccaatgatctgttaatgggcatttgggctgctcctagtttttttgcccactacgaataaggatactataaggctatcatgaacatttatatgaatgtgtctgtgggtttttcttttcttcacttatactttttcttgggtatatacctagaagtgcaatttctagggtattaactttgcaagaaactgccagatcgttttccaactggttgtggcattttacattctcaccaacagtgtaggagagcccccatatgcttcccatcttcctcaacacttggttcgaccagtctttttaattttagctattcaggtgggtgtgcaatgatatctcatcgaggttttgatttacatttccctgatgacttcgtgctttattcttttttctttctttctttctttttttttttttttttgagacagggtctcactctgtcacccaggctggagtgcagtgatgttttcacccatttttctttctttttttttttctttttgagacagagtttcgctttttgcccagttctgttgcccagtttggagtgcaatagcgtcatctcagctcaccgcaacctccacctcctgggttcaagcgattctcctcctcagcctccagagtagctgggattacaggcatgtgccaccacaccaggctaattttttgtatttttagtaaagacagggattctccatgttggtcaggctggtctcgaactcccgacttcaagtgatccgcccgcctcggcctcccaaagtgctgggattacaggcgtgagcctccgcacccggcctgttttcacccattttttccacaataactgtcaaggctgcagggaacaccccttggttactacatcccatgcacacacacctgcagtggtttgtccagggtcagtgccagacaggaatcgcaccaggtgaacatgacttggatatactctttctgccaggaaacattctgcttcaaagtattcactcacctgattttatgttattaaactctaaaattcttaccaatctgatgaatgaaaatggcatcttttggtatgttcagtggtacacggtgatcaatatttacctatcaattatttatctatccatcttctattattatttttattttattttattttattttattttttgagacggagacggagtgtcgctctgtcgcccaggctggagtgcagtgacacggtctcggctcactgcaagctccgcctcccgggttcacgccattctcctgcctcagcctcccgagtagctgagattacaggtgcccgccaccactcccggctaatgttttgtatttttagtagagacggggtttcaccgtgttagccaggatggtctcgatctcctgaccatcttcccgcctcggcctcccaaagtgctgggattacaggcgtgagccactgcgcccggcctattattattattaattcttattattattttgagacagggttgcccaggcagtggcacaatcatagctcactgcagcctcaaactcttggactcaagtgatcctcctacctcaggctcccgagtagctgaattacaagtgtgcctcaccaagcccagctaattttttaaattttttgtacagatgagggtcttcctatgttgcccaggctggtctggaactatttggcccaagctatcctcccgcctcagcctccggagtggctgggattacaggcccgcgccaccacgcccagcctcaatatctccttgacgatgaaatgcatagatgaatgaatgaatgaatgacctctgtttgctcaccatgcacaccctcaagagggttacttgagagctaagactggaaacaaaggttggggccccacccctcccgggccaggccccgcccccggtccccgccctcgccctctcgaggctcccattggaggaggcgcgcgggggctggcccggcgggaggggcggggccggggcccggggcggggcgctgcagcccgcggagcctcccgcccgcccgggctggggtcgcgctggctcggactccgctccccgccccgccgcggccatggaggacgagcggaaaaacggagcctacggtaggagccgcctccggtcaggggccgcctctgctgacctgcgggtgggaggaccttgagccagggggacatctgagaccctaggcaccggcgctgcggctggatggccctccgcgctcgggcccccgcatccgacactgcgcggatcccacgccccctgctctaaccgggtcgccccgcgtcccctccccgggagccccagctccccctccggctgatgggccggggctcacggcgcatgctccgcccggggaggtcccgttatctgggcggctcggatggcgggcgggggaggggaggcgcggcgatctgggctcggaaaagagacagggccctgacctcctcaaatccccctcctcttccaatcccctttgtccatttcttcctccttcccttttccgccagaagtagccgtccggggcttttggccagatggggaaactgaggcaagactgggcagaccgaatacccagctgagagcccaccgagtctggccagccgcctggaaacggcggaaagaagggcgcctttggtgagggggcaggaaggaagcaggaaaaaattgagaaactttcccctccctgtgcaaggggctggcggctcccacctcccatttcgagaggtgctggcgactggaacttcctccggcgaacctcttggggcgacctcaggcatttggccccggggatgggcccaggatgtgggcttctccatcaccagcgccctgtggtgccgccctcccctgaattcccacggtgggaggagttgccatcctcagtttctcctttctcttctccattttgggtccccaagacccaacggagccccagccccacgtgatactaccctgggggcaaagaagcactgtcgcgcccctctttgtgtgacaagaacttcctggaaactgtgacactgaagggccctggggagggggccggaaacggctcgaaaatattcaagaaaaacaagttgggtagagctgtgcctccctgcccccagggactgtatggcctcaggaggctgccaggagagacagatcagggaggctgggaccttccctgcagagcccagccaaggggaggcagcaggacctggccacctcccagcaccccctccccaattgaagcttccagcccagtcccctggagggacccccttggtcttcatttgggctcaaattccagccccagtggctgtgggtgctgtgtgtcccttgggtgtggcaggctgtctctgacctgagagtctcagcctgaggttctagccaggtcttgcccgcttgtgggcagcatctgagggggtcttgggtctctatgaagtttggctgggacagggacgaggggcagaatggacaatgatatgattcacccagccttgaatttggccaaaggatggaattgagctgtggtcggagctaggcagacctcccaggcccacacatgagacaggggaccctgccagacagagcctttgctgggcttaagggagtaccttcaatcaacaaatatttattgagcacgatttaggcaggggtctagacactggaaacccagcagtgaatagaccagtgaaatccttgaccgcagggagtagtcaagggaaggaatgtgtaattttaggttgttgtaagttgtgaagcaaagaacaagacgtcgtgtgatcttgtgtggcagaaacagcagcgattattttaggttactaagggctggaggttgagccagccgtgggaagatttaggggaagtgtgtttcacacagaaagaacagcaaacaaaccacgtagttacttaattacattttgccttggggccaaagggggcatctggtttgattgcttgaagtaggggttttgcttagcttggaagtagttccttcacatcagaaccaaaaacctgggggccttggactggcccatgacgtccctgatagatgaagggagctttcccctggggatggtgtggaagaggggctcacttatcctaccctcctgccccagtggcttcccatccgtcatgagtttaggggctgacatcagacaaacctaggctcaaatcctggctctgacacttaggagccgtgtggccctgggtgagtccgtgacctctctgaagctctgtgtctttgtctataggactcggtggaccacactcactggtgggggaagaattttgcataggctgtcaagctcgatgtgctcaggaggcctctggggctggtagtactggggacatggctttcccgtgagctgatagagaagcaacccaaggcattgacttgggtgagaccaggttgggcaggaagtgcattcctcagcagagatcatatctaaaggaaggcagcagttccaagggaaatggggaaatggctctgggccccggcggatgtcagcaatgggcattgccatccttcccagccagcccacccttggcaagagcagtgcagaaaaagattctgcaatccaaaacaataaactctgaccatggagaaataaaactggggtcggggggacagtagtgatgcttatttaaaaaacggactcttgccaggtattgtggctgacacctgtaatcccagcactttaggaggccaaggctgggggatcacgaggtcaggagatcgagacaatcctggctaccacagtgaaaccccatctctacaaaaaataacaaaaaatgccagccacagtggttcatgcctgtaatcccagcactttgggagccaaggcaggtggatcacctgaggtcgggagttcgagaccagcctgaccaacatggtgaattcccatctctattaaaaatacaaaattagccaggcatggtggtgcatgcctgtaatcccagctactccagaggctgaggcaggagaatcgcttgaacttgggaggcagaggttgcggtgagccgagtttgtgccactgcactccagcctgggcaaaaagagtgaaattcagtctcgaaataaataaataaataaataataaaaatacaaaaaattagtgtacctatagtcccagctactcgggaggctgaggccggagaatcgcttcaacctgggaggcagaggttacagtgagccaaggtggcgccactgcactccagcttaggtgacagagtgagactccgtctcaaaaaaaaaaaaggactcttggccaggcaaggattacaggttcacacctgtaatcccagcactttgagaggctgaggtgggtgggtcacttgaggtcaggagatcgaggccagcctggccaacatggtgaaaccccgtctctattaaaaatataaaaattagccaagcatggtggtgcacatctgtaatcccagctacttgggaggctgagacaggagaactgattgaacctgggaggcagaggttgcagtgagctgagatggtgccactgcactccaacctgggctatggagcgagactccatctcaaaaaacaacaaaaaccagactctggctgggcagtcgctgatgcctataattccagcactttgggagtcccaggtgggaggatcgcttgagcccatgagtttgagaccagcctgggcaatatagtgagaccctgtctctacaaaaaaatttaaaaattaactgagcatggtggtgctcaactgtattccagctacttgggaggctgaggtgggaggattgcttgagcccaggaggcagaggttgcagtgagcaaagatagcgccactgcactccagcctggatgacagaggaagaccctgtctcaaaataaaaagcagattccctggtcccatttgctagaatacaattcagcctgcagtgaggccctggcacctgatttaaatatatatatatacatgtggccgggtgtggtggctcacgcctgtaatcccagcactttgggaggccgaggcaggtggatcacctgaagtcaggagttcgagaccagcctgaccaacatggcgaaaccctgtctctactaaaaatacaaaaattggctgggcacagtggctcacgcctctaatatcagcactttgggaggccgaggcaagtggatcacctggggtctggagtttgagaccaaccttaccaatatcgtgaaaccctgtctctactaaaaatacaaaaatgttcttggaatagtgacgtgcacctgtagtcccagctatgtgggaggctgagacaggagaattgcttgaacccaggaggcagaggttgcagtgagctgagatcgtgccatttctctccagcctgggtaacaagggcaaaactccatctcaaaaaataattatatacatatatattaaaatatatatatacacatacacatatatatgtatgtatgtatgtatgtatgaaaaggtagttacttacggctattttttttttttttttttgagacggagtctcgctctgtcgcccaggctggagtgcagtgacacggtctcggctcactgcaagctccgcctcccgggttcacgccattctcctgcctcagcctcccgagtagctgggactacaggcgcccgccaccacgcctggctaatttttttgtattttttagtagagaccgggtttcgccatgttagccaggatggtctcgatctcctgaccttgtgatcagcctgccttggcctcccaaagtgctgagattacaggcgtgagccacctcgcccggcctcttggggctattttctttgaaagggataatacattcacatgctttaaatacaaaagatacaaaagatgttacggctttgagatgaaagtttccctcttgctctcccaccccggaccatactttattctttgttgttgttgttgttgtttatacacagggtctcactctgtcacccaggctgggctagagtgcagtggtgcgatcatagctcaccgcagcctcaaattcctgggctcaagtgatcctcctgcttctgcctcctgtgtagttgagactacgggtgtgtgccgtgatactcaactaatttttttttttttttttttttagaggcagggtctcaccatgttgcccaggctggtcatgaagtcctgggctaaagcaatcctcctgtactggcctcccaaagtgctaggattataggcgtgggccaccacacccagcttttttttgtttatttgttttgcctaatatacattggagaggatctcttgtcaacacctccaaagcttcctcaatcatttattattattattattatttttttttttttgagacggagtctcactctgtcgctcaggctggagtgcagtggcgtgatctcggctcactgcaagcaccgcctcccgggttcatgccattctcctgcctcagcctcccgagtagctgggactacaggcgcccgccactgtgcctgccactgcccccggctaattttttgtatttttagtagagacgggatttcaccgtggtctcgatctcctgacctcgtgatccgcccccgcctcggcctcccaaagtgctgggattacaggtgtgagccactgcgcccagccaccccgtttctactaaaaataaaaaaattagctgggcatggtggcatgcacctgtagtctcagatacttgggaggctgaggcaggagaatcgcttgaacccaggaggtggaggttgtagtgagccgagatcgcgccactgcactccagcctgggcaacagagcgagactccgtctcaaagaaaaaaaaaaaaaaaggagagacagggtcttgctatgttgccttggctagcctagaactcctgagttgaagggatcctcccgcctcagcctcccgagtagctgggactgatcacaggtgtgtgccatggcgcccagcacaatcttttttcacggtagcatagaatagtacatttgtggatgggctgtcttttatttagccaatcaaagggaatatttattttaaactttttttcgaagttggaaatacatacataaaagggcatagatcctaaatatatgaggctgaaggagctttcacaaggtgaacaccttatctggccagcaaccagatgaggaaaaaagaacatttccagggccctgtcatgtgcaaggagggcctatttgtattattattttattagtatatatatattttatttatttatttatttttttaatttgagacagggtctcactctgtcacccagggttaagtgcagtggtacaatctcggctcactgcaacctctgcctcctgggtttaagcaattctcctgcctcagcctcccaaggacctgggactacaagattcgagttaccgtgcccgattaatttttgtattttttgtagagattgggttttgtcatgttgcccaggctggtctggaactcctgggctcaagctatccacgtgcttcagcctgccagagtgctggggctagagtcgtgagccactgcacccagcctacctttttttttttttttttttttgagatggagtcttgctctgttgcccaggctggagagcagtggcgccatctcagctcactgcaaactccacctcctgggttcaagcgattcttctgcctcagcctccccagtagctgggattacaggcatgtgccaccacgcccagctaatttttgtatttttggtagagacggggtttcaccatattggccaggctggtcttgaactcctgaccttgtgatctgcccaccttggcctcccaaagtgctgagattacaagcgtgagcaaccatgcccggcccagcctacattttaaattgaagtataatttggtttgtttttgttgcttttttcttttttttcaagacagaatcttgctctgtcgcccaggctggagtgtagtggcatgatctcagctcactgcaacctccgcctcctgggttcaagtgattctcctgcctcaggctcctgagtagctgggattacaggtgcacctcaccacgtccagctactttttgtatttttagtagagactgggttttgccatgtttgtcaggctggtctcaaactcctgacctcaagtgatccacccgcctcagtctcccaaaatactgggattaaaggcaagagccactgtgcctggcgaagtataatttacatactaaaaaaaccacacattattagtttttttgtagagatagagtcttgctatgttgtccaggctggtcttgaactcctgggctcaagtgatcctcccacctcagcctctcaaggtactgagattacaggtgtaagccaccatgcccagcccataactctttttaaatgtacagatctatgatgttactcttatttatttatttattttttgagacagaatctgtctctgttgcccaggctgaagggcagggcacaatctcggctgactgcagcctctgcctcctgggttcaagttattctcctgcctcagcctcccgaatagctgggattataggcatgcacaaccatgcccggctaatttttgtatttttagtagagacagggtttcactatgttgaccaggctggtctcaaactcgtgacctcaaatgattctcccactttggcctcccaaagtgctgggattacaggcgtgagccaccgagcctggctaatgttacttatatttagattgttgggtggtggcctgtttttgtaaggctagtgggctaagaatggctcttatatttttaaatggttgtgaaaaaagaaaaaaaaatatatatatatgacagatgatatgtgaaccacaaagcttaaaatctttaatatcttgtccttaacagaaaacatttgcagagccctggtagagaattctccctagagacttttcttttccttttttttttttttttttgagactgagtctcactcagtcacccaggctggagtgcagtgacgtgatctcggctcactgcaagctccgcctcccgggttcacgccattctcctgcctcagcctcccgagtagctgggattacaggcgcccgccaccatgcccggctgatttttttgtatttttttagtagaaacggggtttcactgtgttagccagatggtcttgatctcctgacctcgtgatctgcccgcctcggcctcccaaagtgctgggattacagtcgtgagccaccgcgcctggctttttttttttttttttttttttttgagatggagtttcactcttgttgcccaggctggagtgcaatggcgtgatcttggctcactgcaacctttgcctcccgggttcaagtgattctctggcctcagcctcccgagtagctgggattacaggcatgtgccaccatgcctggctcatttttgtatttttagtagagacggggtttcaccatgttggccaggctggtctggaactcctgacctcaagtgatccgctcgcctcggcctcccaaagtgctgggattacagttgtgagccaccgcgccccgccaagacttttcttttgccatttcccaatcgatccccaaggtgaacatgatatttatttatttatttttaatttaaaaaaaaattttttttgagagggagtcttatgatgttccccaggctggttgaattccccggctgaagcgatccttccccttcaacctcctaagtaggggactataggcatgtgcctctgtgccgggctagagagcattattttaaaatattattttaggctgcgtgcagtgcctcacgcctgtaatcccagcactttgtgaggcccaggcgggtaggtcacttgaggtcaggagttcgagaccagcctgaccaagatggtgaaaccccatctctgctaacactacaaaatttagccaggcgtggtggcaggtacctgtaatctcagctactcagggggctgaggcaggagaattgcttgaacctgggcagcagaggttgcagttagccaagattgcgccactgcactccagcctgggcaagagagtgagacactatttcaaaaaataataaataaataaataaacaaacaagagacccggtgcagtggttcactcctgtaatcccagctgtttgtgaggccaaggtgggtggatcgtggttcactcctataatcccagctgtttgtgaggccaaggtgggtggatcgcttgagtccaggagtttgagactagcctgggcaacattgcaaaaccccttcttcccaaaaatatgcaaaaaaattagctggtcatggtggcttatgcctgtggtccgagccactctggagggtgaggtgggaggattgcttgagcctaggaggcagaggttgcagtgagccgacattgtgccactgcactccaacctaggtaacagaatgagaccccatctcaaatatacaagtaaacaaataaactcttacataataaaattaataaattccctctgttctggcagggggactaaaagctaattataagtaagtcctcaagtccatggaagattttagctttccatgtgaaagaatcttctacaaatctttggctagctgttttcacctcagaggtagctcagccaagaagtctccttccagattgtgacctattaatttctgtgtgtgtgtggcatctggatctttttaaagcttcttaggctgagccgggtgtggtggctcactcctataatcccagcactttgggatgccagggcggaaggatcacttgagcccaggaattttataccagcctgggcaacatagtgagaccctgtttctgcaaaacaaaaaattaaaaattagcggggcgtggtggtgcatgcctgtggtcccatccactagggagtctgaggcgggaggatcacttgagcccaggaggtcaaggctgcagtgagctatgattgcgcccctgcacttcatcctgggcaaaaaaggagaccctgtctcaaaaaataaaaaataaaaaaaggttaaatgtttctagaagcaaatctctggtttggtgcctaacatagtccagcatacagtaggcgctctatcttttgcccttaacccttctgagcctccccacccagatgctgtcctcaaaccctttgtcaaaagaggtgtctgggcagctggcgatgctcattccccaggcacagacttctgggaaggcagaggccagtggctggctgtacgggtgaggccttgggccgctgcagcccttggggacttggccagtgtccggaagctgtgggggctgggtggcatttgatgtcctggcaccagcactgtgactgggcaggctgtggcagttctcttatcgcccacgcccactgcacttgggtgggtcagccgtcacagccagcaaggctggcacccgaaggctgcctctcccaatcctggccttgtccaacagctcaattttcccaatttttcttccacaccattgccgcaacgttatctctgcttctcccagtacctgccaaggaaaaggcctgggttggctccagcagggcgttggtttgactcctggctgtgctcctcaccagctgtgtggcccgagcaagcaacctcagtgtgcccgtcgtgaaatgggatcacactaatggttagtggggattggagaagtttttgttttgttatttttatttgtttggttttggttttttagagacagtgttttctgtcatccaggctggagtgcagtggcgtgatcacagctcactgcagcctctgcctcccgggctcaagcgattctcccacctcagcctcctgagtagctgggaccacaggcatgcaccaccacacccagataatatagttattttttactttttattttctttcttttttttttttgagatggagtcttgctctgtcacccaggctagagtgcagtggcgcaatcttggcttgccacaacctctgcctcctgggttcaagtgattctcctgcctcagcctcccgagtagctgggactacaggcgcccaccactatgcccggctaattttttgtatttttagtagacatggggtttcaccacgttggacaggctggtctcaaactcctgacctcaagtaatctgcctgccttgacttcccaaagtgctgggattacaggtgtaagccactgcgcctggccaagttgaagactttggctgggtgtagtggctcatgcctgtagttcaagcactttgggaggctaaggcaggaggactgcttgaacccaggactttgagaccagcctgggcaacatagtgagaccccgtctctttaagaaaaatggaagagggtggtagcagagtcagaggaggacatggaacgacggaagcgaggtgggtttgatgtgattgctgtctttaaaaatggaagaagtggccaggagccaaggaatgtgggcggcctctagaaggtgaaacagacaaggaaacagattttcccctaaaatctccgaaagaaacagccctgcctacacatcgattgtagcccagtgagatgcattttgtgcttctgtcctcctgagctgtgagataataaatttgtggtttttatttattattattattattatttttgagacgagttttgctcttgttgcccaggctggagtgcagtgatgcgatcttggctcactgcaacctctgcttcctggtttcaagcaattctactgcctcagcctcctgagtagctggaattacaggtgcacaccaccacgcccagctaattttttgtatttttagtagagatggggtttcaccacgttggccacgctggtctgaagctcctgacctcaggtgatccacctgcctcggcctcccaaagtgcagggattacaggcatgagccaccgcacccgtccataaatttgtgtttttttaagccaccaaggcattggtgtcttgttacagcaacgaaaggaaataatgcatttgaccctcaaaccacatgggtgtgaggggcaccaaccccctgtgaaattagaaatctgtgtatgccttaagtttttgtagagacagggttgtgatctgttgatcaggctggtctccaactcctggcctcaagagatcctcccacctcagcctcccaaaatgctgggattgcaggcatgagtcaccatgcccggcctgcatataactgcatataagtcccccaaaacttaattagtgatagcctactgttgactcttagccttacggacaacatatcaacatacacatattgtgtctctgtattatatatatcgtattcttacaataaagtaagctgaagaaaagaaaatgtggctgggcgcggtggctcacgccgataatcccagcactttgggaggctgaggcgggcggatcacccgaggtcaggagtttgagaccaacctggccaacatggtgaaaccacgtctctattaaaaatacaaaaattagccggacatggtggtgcgtgcctgtaatcccaggtacttgggaggctgaggcaggagaatctcttgaacccgggaggtagaggtcacagtgagccaagattgcgccactgcactccagcctgggtgacagaatgagactccgtctcaaaaaaaaaaaaaaaaaagaagaagaaaagaaaagaaaatgttattaagttggtgcaaaagtaattgcgttttttttttttgccattccttttaagggaaaaaatattaaaatgtaaggaaaagaaaatacatttattatttattaagtggaagtggatcatcaaaaaggttttcagaggctgggcgtggtggctcacacctgtaatcatagcactttgggaggccaaggcaggtggatcatttgaggtcaggacttcaagacaagcctggccaacatggtgaaaatcctgtctctaccaaaaataaaaaaaaaaattaggggccaggtgcagtggctcatgcctgtaatcccagcactttgggaggccaaggtgggaggatcacttgaggtcaggagtttgagaccagcctggccaacatggtgaaaccccatttctactaaaaatacaaaaattagccaggcatggtggctcacacctgaagtccccgctactcgggaggctgaggcacaagagtcgcttaaacccgggaggcggaagttgccgtgagccgagatcacaccagtgcgctccagcctgggcaacagagggagactccgtctcaaaaaaaaaaaaaatggtcttcacattgagtgagctgaggaggaagaggaagaggaaggggaggggttggtcttgctgtctcaggggtaacagaggcagaagaaaaattgtgtttaaggggaaccatgaagctcaaacctgtgttgttggaaggttaactgtccaaacattgacttgggagctggacagcttgggtctgctgattgaaatctttcacaccatgggcaccttctttctctctaggcctcagttgatctgtctgtcaaatggggataatgataggaggtgctgtaaagatgaaatgaggcgggctggacatggtggctcacacctgtgatcccagcactttgggcggccaaagcgggattgcctgagccaaggatttagagaccagcctgggcaacatagcgaaaccctgtctctaccaaaaatacaaaaattagccgggcatggtgacatgtgccagctgaggtggaagatcacttgagccctggaggtcgtggctgcagtgagccaagatggtgccactgctttccagcctgggtgacagtgagaccctgtctccaaagaaaaaaaaaaaaaaggatgaaatgaggtgaaccatgtaacattttattattatgtttatttatttattgaaacagagtgaaactgtgttcaatatacacagtgagaaagacagggtctcattctgtttcccaggctggagtgcagtggggcaatctgagccctctgcaacctccgtctcccccggctcaaagattctctcacctcaggctcgcaagtagctgggactacaaaggcatgtcaccacgcccagttaatttttgtttttttgttttgttttgttttgttgtttttttagagacgaggtcttgcctgttgcttagtctgctcttgatctcctggactcaagtgatccacccaccttggcctcccaaagtgctaggattacaggattgagccaccatgtcctgtctctattttcacttttatttttagagaccgggacctggcatagtggctcacgcctgtaatcccagcactttcggaggctgaggtgggcggatcacctgaggtcaggagttcaagaccagcctggccaatatggtgaaaccctgtctctactaaaaatacaaaaactagctgggcatggtggtgggcgcctgtctcaaaaaaaaaaaatagagactgggtcttgctctgttgccaaggctgtagtacaatggtgctatcacagctcactgccgcctgtaactcctgggctccagtcatcctcccacctcagtctccctggtagctgggactacaggcacggaccaccacgcccagcttgttcttcttatcttttattttttatttttttgagatggagtcttgctctgtcgcccaggctggagtgcagtggcgcgatctcggctcactgcaagctccgcctcccgggttcatgccattctcctggctcagcctccttagtagctgagactacaggctctcgccaccacgcccggctaatttttgtatttttagtagagacggggtttcatcgtgttagccaggatggtcttgatctcctgacctcgtgatccgcccgcctggggctcccaaagtgctaggattacaggcatgagcaaccacgcccagcccttgttcttcttcttatcttgcagcattgttgcaaagatatagcgagttcccatcctgcggggtttagattaggctctcagggcagaaaccattagtatttgctgttcccctcccttcgtccccacccagctaaggttaataagagctaatggaacccatcacaagatattaccaatgttccctctttacagagagcccacaaagccaggccttgagccaagtgtatgccaggcacctctctctgcattttcagctccatctcacagaggagtaactcaagttcacacagctaggcatgtcccagctttaccattcatggcaccaaaccctcaggctccccaatcttttcctgagacagctgagactccctcatgtgttccctccccggtgcggccctgtcatgctcctgctcaaacaccctccatggctcccacgtactcatcaaacctagactgggaacggaccgctcaagtgactagcaaagcccttcccttttctgagcctcggttctctctcctataaaatgggttgatgaaatggcctccagtatggtggagaggatctgaaaggtagtgagttcgctttgctcaccactggctgtctctatgcagccgctcaccctctgccattctagctgacaccagaaacttccggtactcccttgtctctctgccttctggctttaccggtcttactgcctatctgatggtagaagtattctcttatgctttcccttcatacttgtaatagttttgagttttctgtgtttgcgtgattaatccatgtggaattttttttcttttagacagtttcactcttctcatccaggctggaagtgcagtggcgtgatctcggctcactgcaacctccgcctcccgggttcatgccattctcctgcctcaaactcccgagtagctgggactacaggcgcctgccaccatgcctggctaatttttttttttttttttttttgagacggagtctcgctctgttgcccaggctggagtgcagtgtcgtagtctcggtttacttcaagctccacctcccgggttcacgccattcttctgcctcagcctcccgagtagctgggactacagacacatgctgccacacccggctacttttttgtatttttagtagagatggggtttcaccatgttagccaggatggtctcgatctcctgaccttgtgatctccccgccttcgcctcccaaaagtgctgggtttacaggtgtaagccactgcgcccggcctttttttttttttttttttttttgagacggagtcgtgctctgttgcccaggctggagtgcagtggcgccatctcggctcactgcaagctccgcctccctggttcacgccattctcctgcctcagcctcccgagtagctgagactacaggtgtctgccaccacgcccggctaattttttgtatttttagtagagacggggtttcaccgtgttagccagaatggtctcgatctcctgacctcgtgttccggccatgctcgcctaatttttttgtgtattttagtagaggcagggtttcgccgtgttgcccaggctggtctcaaactcctgagctcaggcaatccgcctgcttcagcctcccaaagtgctaggattacaggcatgagccaccatgcctggccttttcttcctaatatacattcagggctactgaataaagaatttatcctttccctgtaaattctacatgtatcatgtatacaattctttttttttttttttttttttttggatacagggtcacactatgtcacccaggctgtagggcagtggcgcaatcacagctccctgaaacctgaacctgaacctcctgggctgacgtgatcctcccaccctaggcttccccagtagctgggactacaggcacatcatgcccggctagtttttaaaaattttggccgggcacagtggctcacatctgtaatcccagcactttgagaagccgaggcaggtgcgtcgctggaactcaagagttcgagaccagctgggcaacatggcaaagcccagtccctacaaaaaaatataaaaaattagccgggcgtggtgttgtgtgtctgtagtctcagccacttgggaggctgagggagatgggcttgagctcagggggtagaggttgcagtgagccgagatcatgacactgtactccagcctgggcaatacagccagaccatgtttcagaaaaaaaaaaaaaaagtgttttttttttttttaagcctcagagcctactttggctcaggaggctgctcgatttgcaatacaaaaaagaaaaaatatttttgtagagacgaggtctcaatatattgcccaggctagtgttgaactcctggagtcaagcaattctcttgccaaatgttgggattacaggcgtcagccactacgcctggcctgagattcatttaagtataaaattagcaaatctccgccggacgcagtggctcacacctgtaatcccagcacttccagaggccgaggcaggcggattgcctgagctcaggagttcgcgactagcctgggcaacacagtgaaacccccatctctactaaaatacaaaaaattagccaggcgtggtggcgtgcacctgtagtcccagctacttgggaggctgaggcaggagaatcgcttgaacctgggaggctgaggttgcagtgagccaagatcatgccactgcactccagcctgggtgacagagcgagactccgtctcaaaaaaaatctgcaaatctccaacctgggcaacatggtgaaatcctgtctctacaaaaaaaaatccaaaaataattagctgggtgcaatggtgtgtgggtagtcccagctactcgagaggctgaggtgggaggatcactcgagcccagcaggtggaggttgcagtgagccaagattgtttcaccacactccagactgggcaacagagtgaggctttgtctcaaaaacaaaaacaaaaaaaaaattactgggcgctgtggctcatgcctgtaatcccagcaccttgggaggctgaggtgggcggatcgcctgaggtcagcagttcgagaccagcctagcaaacatagtgaaaccccatctctactgaaaatacaaaaattagcctggcatagtggtgtgcgcctgtaattccagttacccgggggtgctgaggcagaagaatcacttgaacctggatgttgcagtgagccaagatcgggcaacagagcaagactccatctccaaaaaacaaacaaacaaacaaaaaacgcaaattaatttttaaaatatgtacccttagaaaattctaagctcgtttttattttcagtgttcactctacatacatgtattatatattgtggctattcattcaacaaatacttattaaatgtttgttttatgccaggggctatgctgtatactggggacgcagccggaatgaaagacacacaaatccctgtccttatgcaggcaataggcaagagggcagataattaacaaccaataagcaaatgtctaacatgtcagatggtgataagaagcaaaatgtatcacatctgtaatcccagggttttgggaggccgaggtgggaggaaggcttgagcccattgagcacaggagtttgagaccagccttgggcaacatagcgagacactggtctacaaaaaattttaaaattaggcaggcatggtggtgtgtgcctatagtcacagctacttgggaggctgaggcgagaagatcatttgagcctaggaggtttaggctgcagtgagctatgattgctccactgcattccaggctgagtgacaaagcaagactctatttgataataacaacaaagagaaagtcataggggtcaggtatagtggctcatgcctataatcccagcactttgggaggccaaggtgggcagatcacttgaggtcaggagttcgagaccagtagtagagacatggtaaaagccagtctctgctactaaaaatacaaaaatcagccaggcacgttggtgtgtgcctgtagtcccagctacttgggagcctgaggcaggagaactacttgaacccgggaggtggaggttgcagtgagcctagatggcaccactgcactccagcctgggcgacagagcgagactctgcctcaaaaaagaaaaaaaaaatgaaagaaagaaaagaaaaggtcataggacagagaggaaagggatggttgggtgtttttttttttttttttttggtttttgtgggttttcttttagatggagtcttgctctgtcacccaggctggagtacagtgccaggatcttggctcattgcagcctcgacctcttggtctcaggtgatcctcccacctccacctcccaagttgctgggactacaggtatgtgtcaccacacctggctaatttttaatttaatttatttatttttgagacggagtttcactcttgttgcccagactggagtgcaatggcatgatctcagcttgctgcaacctccgcttcccaggttcaagcgattctcgtgcctcagcctcccaagtagctgggactacaggcatgcaccacctcgccccggctaatttttgtagtaatagaaacagggtttctccatgttggtcaggctggtctggaactcccgacctcaggtgatctgcccaccttggcctcccaaagtgctgggattataggcgtgagccactgcgcctggcctcacctggctaatttttgtacttttagtagagatggggtttcacagtgttgcccaggctggtctcgaactactggcctccagtgatctgcctgtctcagcctccccaagtgctaagatgacaggcttgagccaccacgccttgccaaggtgatatttcaggcaaggcctgaaggcaacggagctgtatggatgtctgagagaagagcattctaagcagagggaccgagcagctagtgcaaaggccctgaggtcagaccatgcctgctgagcgtgggacgtacccaggaggccagtgaggctgaacagagtaagccatggagagagagagggaggaggtgagggcagggaggtgacagggcaggtcatgcaaggctttgtgggctgtggcgaagagctgggctttttcctcggaatgaggtgggaaccatggaggtttctgagcagagcagggatgtgtcctgacttaggtgtgcacagatgtctctggccgctatagtgaggatagaaagtgtctgtgttggtccaggcaggagatgacagggctgtgtgaaagggtgggtgcttgaggagcaggtgagaagaggttggattctggatagctctgaaggcaaaactgatctcaagcagagaggcagcccaggttcctggccagagcacgtgggaggatggagcggagtcatgggataatcagaagcttggacaggccaggcacggtggctcacacctataattacagcactttgggaggctgaggtgggaggatccctgaggccaggagttccagaccagcctgggcaacattgcgagaccctgtctctactaaaaatacaaaaaattacctgagtgtggtggcgcgtgcctgtgatcccagctactcaggaggctgaggtgggaggatcgcctgagcccaggaggtcaaagctacagtgagctgtgattatgccactgcattccagcctgggcgacagagtgagaccctgtctcaaaaacaaaaaagcttagatgccgccgcactgagtatgagatgctcacgtgtgttggggggagacagatgtcacataggtgtgcagctcagagacaagggtttccagagggcttaacttttgggactcctcagtgtggagctggtgggtggggcctgaataaattgtccccagggcaccctgtgtagttgggaagagaagaggcctgtggctcgctctctttgtccactgcttggaatgggtagggtgggaccagccagcctttgggctggcagagacttcgagaaccacagggcttctttaggagtctgggtcaccccagggcatgacctggcgcctcaggccttgcctgtggtccaggtgtttagacagggcccctctgctggtggctactaggaggagagggcgcctttttaaggataagttgagttagtgaccagagccctgcctgcgagtcctagagtctaaggcagcagctacaattattggacaccaaatgtatatgatcacgctgactgtataacctcatgctgtctgtgtacacccagcactaaatgtatattcctgctgaggatacctccacaccacctgtataatgccatgttaaccaaataattggctgcactataaatatctataaatattcaagtagaggcaggttgtggcgtggtgactcgtgcctgcaatcccagcactttgggaggttgaggtgggaggattgcttaaggccaggagtttgagcccagcctgggtaacacagtgagatcctgtctctatttttattgtattgtatttttttttttttttgaggcggagtctcgctctgtcgcccaggctggagtacagtggcataatctcggctcactgcaacctctacctcccaggttcaaacgattctcctacttcagcctccccagtagctgggattacaggtgcccaccaccacacctggctaatttttgtatttttagtacagacagggttttgccttgttggccaggctggtcttgaactcctgacctcagtgatctgcccgcctcggcctcccacagtgctgggattacaggcatgaaccaccacacccggctaatttttgatttattgattgattgattttttgagacactcgctctgtcacccaggctggagtgcagtggcacgatctcggctcattgcaacctccgcctctcgggttgaagtgattctcctgcctcagcctcccaagtagctgggactacaggtgcacaccacaacatccagctaatttttgtatttttagtacagacggggtttcaccaagttggccaggatggtctcgatctcttgacctcatgatccgcccacctcggcctcccaaagtgctgggattataggtgttagccaccacacccagcctattttcttttttctttttctttttggagacagagtctcactctgtcccccaggttggagtgcagtgaggcaatcttggctcactgcaacctccacctcctgggtttaagcgattctcctgcctcagcttcccaagtagctgggattacaggcatgtgccaccacactggctaatgtttgtatttttagtagagaaggggtttcaccatgttggccaggctggcttagaaatcctgatcgacctgcctcagcctcccagagtgctgggattacaggcatgagccactgcacctggcctatgcctgctctttgaggtcagttttggtttcatactttagcctcattttgcagttgaggaaactgaggcttaaggaagataagccctttgttaagtatcctctagttcagagggtgcagaaggagcatttgaattcagggcgacccaggaggatgtgggctccacaagggtggagattgggtctctctggttcctcactgtatgcggtgccccgcccaaggcctgcacccactaagggctgaataaatacttgttctaagaccaggcccagtagtgcacgcaggtaatcccagcactttggggggccacggtgggaggagcccacgagtccaggagttaaagatgagcctgggcaacatagcaacatcccatctctacaaaaaaaattaaaaattagccgagtgcagtagagcacctgtagtcccagctactcaggaggcttagtcaggaggatggcttgaggcagggaggtcgagactgcgatgagctgtgattgcaccactgcactccagcctgggcaacagagggagatcctgtctcaaaaaaaaaaagcagcagacagaaagaaaactaatttcctgcacagcttggagaagttttcagcaccaacattccacagttggttgtctgggtttgggcagtaggccgttttccctcccagtgcctcagtttccacacctgcaaaacgaagccacggaaacgccctttcagggtggccaggggttctaggcggcatcgcccggtggcagggtgttcccagggtgaagccgcagggttcccgggtgggggcggggaaggctaaatgcggccggccggtgagtggcgggagcagctgcagccccgcccgcgccctcccgggtcccttagtctgggcagctgcccagctcgggccggtctgaccggtttgggccgccccgcctggcgctgtgctgggaggagccgccgccagtcgcgcggtcagtgcctccctccagactcgggagggtcgagggggcgcgggagagagcgcgggcggccgccggggctggtcgcctgcagggatgggggacgagcggccccactactacgggaaacacggtaggcagcgacccccgcccgtagccccgggccgacccctcggtccctcggagggggccttgagagaacatggggcgcagggaagggggctggagggggagcgcaattgcaaatctgcgcctggagcctccccaccatcagccaggccccttcaccccacttatcccccgcagcctcgcagacgaccctccttactctcccctacccgaaggacctgcccctgtacccctctgcctggcactgctgccggcgcctccttccccctatcccacctcagatcttccccatctccacctggttccgtggtggtcaccatttcagccctcttcccagtgggtggccgccagttaataagtttgttcacagttagtgatccctccttcctcccctgtcctggcctgccagaactgggggcttgggtgtggtcacctggaggtgggtgaggcagaaaattccacaggtctctgaattttattcttgccaaggcaaagacacccctaggggcttttgggagggggctctcccagccctgtcttggttcaggtctccaatcccatccatcttaatcttcttgactttcaggaacgccacagaagtatgatcccactttcaaaggacccatttacaataggtaagagctctgggttttggggggttctccccgctaatactaccccaatccctgtctcttcacaccccctcccatctgttctccaacaaactggtgacaaatatttgaaacttttttttttttttgagatggagtcttgctctgtcaccaggctggagtgccgtggcgcgatctcaatctcggctcactgcaaccttcgcctcccgggttcgagcaattctcccacctcagtctcccaagtagctgggattacaggcttgcaccaccacacctggctaatttttttttttttttgtacttttagcagagatgtttcgctgtgttgcccatgctggtctcgacctcgtgagctcaaagcgatccacctgccttggcctcccaaagtgctgggattacaggtgtgagttaccacacctggcctggacttaatttttaccatgtttatatttatttatttatttatttatttttgagatggagtctcactctgtcacccaggctggagtggtgcaatctcagctcactgcaaccttcccctcctggttcaagcacgtcttctgtctcagcctctccagtagctgtgactactcagaggctactcagaaggctgaggcaggagaattgcttgaatctgggaggtggaggttgcagtaagctgagattgcgccactgcactccagcctggaggacaagagcgagactctgtctcaaaaaaaaataacaaaaaaataaaatacagccaggcacggtggctcacacctataatcccagcactttgggaggccaaggcaggtggatcacttgaggttaggagttcgagaccagcctggctaacatggtgaaaccctgtctctactaaaaatacaagaattagctgggcatggtggcgggcacctataatcccagctacttgggagactgaggcaggagaatcgcttgaacctgggaggtagaggttgcagtaagctgagatcgttccactgcactccagcctgggcgacagagtgagattccctctcaaaaaaaaaaaaaaagtctagcttgggcaacatagcgagaccttgtctctacagaatgtatataaattaaaaaaaaaatgtgtggtggtgtgcacctgtagtctcaactacttgggaagctgaggcaggaggatcacttgagcccaggagttcgaggctgtagtgagctatgatcatgccactgtactccagcctggatgacggagtgagactctgttgcacaaaattaaaaaatgaaatgaaataaaaattaaaatgcatgtgccctttggtacggcattcaaacgactcaggaaaatttgtccaaataacacatggatgagggtgtttgcagagggcagatgggcccatggtgcacacagcaccaagcctcctccaaacactgcccctctgctccccaggggctgcacggatatcatatgctgtgtgttcctgctcctggccattgtgggctacgtggctgtaggcatcataggtgagtagagaatgagcaggacttggagttgcagggtaggcggaggcagccatggcctctggagtgggaacagggctggatctgaggagtggcagtgtctcagtatccctggatctttccacagcctggactcatggagaccctcgaaaggtgatctaccccactgacagccggggcgagttctgcgggcagaagggcacaaaaaacgagtgagttgactccttgcggcctggtggggctggggaagagggggcagaagattctaggcattccccatctctctaagtccagttaacaagtgcttataggctgggcgcggtgactcacgcccgaaattccaacactttgggaggccgaggcaggaatattgctttaggctaggagttcgagaccagcctggccaacatggcaaaaccccgtctccactaaaaatacacaaattagccaggcatggtggcacatgcctgtaatcccagctactcaggaggctgaggcaggagaatcacttgaaccacaggaggcagaagttgcaatgagccgagatcgtgccactgcactttagcctggggcacagagtgagactctgtctcaaaacaaacaagcaaaaattaagtggacgtggtggggcacacctctagtcccagctacccagcaggctgaggtgggaggatagcttgagctgggaggccaaggctgcagtaaggtatgattgtaccattgcactccagcctggacgacagagcgagacctggtctcaacaaaacaacaagaaaagaaaacaagtactgataaacgtcccactaccctcagccactagtctagtccttggggacacacagctctaaatgagatagtaagcatcctgttctctggcagcacacattttaagggcgggagagactgagaggggacagtcctggattacgcgtcaggtggtgatgaacaggtgagacaacagagcaagcatagcctgagtggcgtcacttcctggctctgtgacctagggcaggtgtctcaatctctctgaacctcgttttcctcatctctaaaatgaggatcataacagtcccaccctcatggggctattttgatggttagatgtgccaatacatgtacagagcttagaatgccacctggcatcgctgggcgtggtggctcacacctgtaatcccagcacactttgggaggctgaggtgggaggatcaagaccagcctagtcaacatggtgaaaccccgtctctactaaaaatacaaaaaaattagctgggcattgtggcatgttcctgtaatcccggttactcaggaggctgaggcaggagaattgcttgaacctgggaggcagaggttgcaatgagccgagatcgtgccactgcactccagcctaggcaacagagcaagactccatctcaaaaaaaaaaaaaagaatggcacctggcatagagttgctgatgctgcagtttttaaactattattattattattattactattattattttgaaacggaattttgctcttgttacccaggctagagtgcagtggcacaatctcagcccactgcaacctccgtctcccgggttcaagcggttctcctgcctcagcctcccgagttgctgggattacaggcatatgccaccatgcccagctaatttttgtatttttagtagagacggggtttcatcatattggtcaggctggtctcgaactcctgacctcaggttatctgcctgccttggcttcccaaactgctggtattacgggtgtgagccaccacacccggcctattattattattactattattattattttgacacagtgtctcactctgtcagccagtggcaggatcatagctcgctacagcctggaactcctgggcttaagcgatcttcccacctgggccttccaaagtgctggcacaagacaggcctgagccaccctgcctggccctatataagatatctttttttttttttgagacagagtctcgctctgtcgcccaggctggagtgcaatggtgcgatcttggctcactgcaacctccgccacccaggttcaagcaattctcctgcctcagcctcctaagtagctgggattacaggtgcccgccaccacacccagctaattttttgtatttttagtacagacggggtttcgccacgttggccaggctggtctcgaactcctgacctcaggtgatccgcctgccttggcctccaaaagtgctgggattacaggtgtgagttactgcacccggccatataaaatatcttaaaggaaacaataggccgggcacggtggctcacgcctgtaatcccagtacttagggaggcccagactggaggattgcttgacaccagcctgggcaacatggtgaaattctgtcgctaccaataatagaaaaaattagccaggtgtggttgcgcacacccgtagtctcagctgctcaggaggatgaggtggaggatcacttgatcctaggaggtagaggctgcagtgagccaagattgtgccactgctcgctctgtctgggcaacagagaaagactcttgtctcaaaaaagaaaaaaaaacaaaagaggccgggcgcagtggctcacgcatataatcccaacactttgggaggctgaggcgggtggatcacctgaggtcaggagttcgagaccagtgtggccaacatggcaaaaccccgtctccactaaaaatacaaaaattagctgggcatcgtggcgggcacctacctgtagtcccagctactcgggaggctgaggcaggagaattgcttgaacccaggaggcggaggttgtagtgagcccacatcacaccattgcactccagcctaggcaacagagcaggactccatctaaaaaaaaaaaaaagagaaaaataaaaaaagttttctatagggtggttaagaagtcttaacaggtcgggtgtggtggcttacacctgtaataccaacactttgggaggccaaggcaggcggatcacctgaggtcaggagtttgagaccagcctggccaacatggtggaaaccccatctctactaaaaatacaaaaattagccgggcttggtagcgggcacctgtaatcccagctactcgggaggctgaggcaggagaattgcttgaacccgggaggcggaggttgcagtgagccgagatcacaccattgcactccatcctgggcaacaagagcgagactctgtctcaaaaaaaaaaaaaaatcttaacagtttccattctcccttctctaactccaggaacaaaccctatctgttttatttcaacattgtgaaatgtgccagccccctggttctgctggaattccaatgtcccactccccaggtaacctggtccccaccgttccctttttcctctccccgcttcccatccttttccccctgtgaatgtgggctgcgacctcagtcctgagcagtctgccccaactccacccaatcccttccttctcccctcccagatctgcgtggaaaaatgccccgaccgctacctcacgtacctgaatgctcgcagctcccgggactttgagtactataagcagttctgtgttcctggcttcaagaacaataaagtgagttgtagactgtcctgagagcacaggtatgggcagtggcagtgtactagacttggggactcacctccctccatctctcttggcagggagtggctgaggtgcttcaagatggtgactgccctgctgtcctcatccccagcaaaccctgtgagtcaggggatcccaggaggctcaggtggtgacggggaggctctgcagaggctcagcctgactggtgccatcctctgctccatgcagtggcccggagatgcttccccgctatccacgcctacaagggtgtcctgatggtgggcaatgagacgacctatgaggatgggcatggctcccggaaaaacatcacagacctggtggagggcgccaagtgaggatattggcgcaccgcgccagggtctcactttgctgggtgggacaggcaatcccctgtggttggcctgatcatggaagagggtctgacccgagccttgtcctccttcccccaggaaagccaatggagtcctagaggcgcggcaactcgccatgcgcatatttgaagattacaccgtctcttggtactggattatcatgtaagtcaggagggaaggggcctctcccctggctgccccctctaagcctggctgagggtggagtctgttcatgaccgttttcttttccccagaggcctggtcattgccatggcgatgagcctcctgttcatcatcctgcttcgcttcctggctggtattatggtctgggtgatgatcatcatggtgattctggtgctgggctacggtgcgtcaccccctccctgtggcttctctttcctgaatccgcacactgccctgccctttcccgtggaaatggcccatcaggaaaacaaaaaaaagtcaggccgggcgtggtggctcacgcctgtaatcccagcactttgggaggccgaggcaggcagatcacccgaggtcaggagttcaagaccagcctgaccaacatggagaaaccccgtctctactaaaaatacaaaatcagccgggcatggaggtgcatgcctgtaatcccagctactcaggaggctgaggcaggagaatcgcttgaacctgggaggcggaggttgtggtgagccgaaatcacgccattgcactccagcctgggcaacaagagcgaaactccatctcaaaaaaaaaaaaaaaagaaaaaatgtctcagcaccgtagttaaggatgcatactctggtatcagaatagcagaggttcaaatcctggctttgccaattctttgggcaagtgcctcaacctaactgtgcttcaatttctttcttttttttttttgagacggagttctgttcttgtcacccaggctggagtgccatggcgcgatcttggctcactgcaacctccgcctcctgggtccaagctattctcctgcctcagcctcccaagtagctgggattacaggcatgcacctccatgcccggctgatttcgtatttttagtagagatggggtttctccatgttggtcaggctggtctcgacctcctggcctcaggagatctgcccgcttcagcctcccaaagtgctaggattacaggcaggagccaccgcgcccggactgcttcaatttatttctctataaaatgagggtaattcatatttctagttggcaaactaaatgacaaggaggtaatgagcagataaaatatgggtaggggcctgtttagttcaggcctgtggaatccagaggcacaatatcgtgctcaacaaaacagtgcttcatattttggatttttgttgtttttgagttgttgttttgttgttgttgttgagacggagtcttgctttgtcacccaggctggcgtgcagtggtgcagtctcggctcactgcaatctctgcctcccgggttcaagcaattttcctacctcgcctcccgagtatctgggattacaggcgcacaccaccatgcccggctaattttttttgtatttttagtagagatggggttttaccatattggccaggctggtctcgacttcctcgtgatctgcctgcctcgacctcccaaagtgctgggattacagacgtgagccaccgcgcccagccttgatttgttttttgagacagagtctcactctgtcacccaggctggagttcagtggcacaatcacagctcactgcagccttgacctcctgggctcaagtgatcctcccgtcttggcctcccaagtagctgaaaccacaggcaagcaccatcatgcctggctaaatttttaatatttttgtagagacaggttctccctatgtggcccaggctagtcttgaactcctgagcttgagcagtcctcccgccttggcctccctaagtgttgggattacaggcgcaagccactgtgcctggcccatattttgattattccttgaactttcctggaagaaaaatgcttggcaatccaatttgaggacactcatagtaaaatattcatattaatagtggtttctagctgggtgcggtggcgcacgcctgtaatcccagcaatttgggagacagaggtgggcggatcacctgaggttgggagttcgagaccagcctgaccaacatgtagaaaccccatctctatttttttttttttttgagacagagtctctcactgtcgcccaggctggagtgcagtggcgcgatctcagctcactgcaacctccgcctcccgggttcaagcaattctcctacctcagtctcctgagtagctgagattactggcgcccaccaccacgcccagctaattttttttttttttttttttttttgtatttttagtagacacggggtttcaccatgttggtcaggctggtctcgaactcctgacctcgtgatccacccgtcttggcctcccaaagtgctgggattacaggcgtgagccaccgcgcccggccaaccccatctctattaaaaatacaaaattagccgggcatggtggcgcatgcctgtaatcccagctgctcgggaagctgaggcaggagaatcgcttgaacccgtgaagtggaggttgcggtgagccgagattgtgccattgaactccagcctgggcaacaagagtgaaactccgtctcaaaaaaaaaaaaaaagagagagaacttagaccatggcagcatatgattatgattccaagtagggggaaagggttctggaagttctcttctgaaggtgacacttgagcagagacctaaggatgtgtgggatccagccatggggagagaatgcaccgggcggtgggaactgcaagtgtaaagtccctgaggcagaagcctcgatgtttgcttctgttaaatgggggcagttgtagctgctttgcaaagttgcaggaggcactgctggactgagcttgtggttcccccatgcaggaatatttcactgctacatggagtactcccgactgcgtggtgaggccggctctgatgtctctttggtggacctcggctttcagacggatttccgggtgtacctgcacttacggcagacctggttggcctttagtgagtcacagtctcccattcctgcccccacatgaggccttggagggagtggggagcccagccggctcagcctttgccctttgcagtgatcattctgagtatccttgaagtcattatcatcttgctgctcatctttctccggaagagaattctcatcgcgattgcactcatcaaagaagccagcaggtggggggccagggtgccaggggccaggatggagctgtccctagagttgtgtcttttgccctgacgcctgtgtctctgctcttccctagggctgtgggatacgtcatgtgctccttgctctacccactggtcaccttcttcttgctgtgcctctgcatcgcctactgggccagcactgctgtgtatctgcccccagacactgatctctgaccccagggatggctaaagaccaactttgcctagaagtgacctgcagcttagggatagggctggaaactggtgggagaatggattctttcccacaaaagtccctggggtcctcagtcctagacctctgcttccttaacgaacctccagcttcctgtccacttccaacgaagcggtctataagatctttgatgacagcccctgcccatttactgcgaaaacctgcaacccagaggtgggcgtccccggggtggggagggcaggtattgccccagcaggccccagatgatttgaaacctctcatgtccacttggaggttcagcaaacaattggcccctgttgcatgtcctgtgctaggtgtgggggaggacgcacagtggggaagagactctctaactggatcgaacaacttcccagggcaagctggcttcctctcttcaacttgaccaggccttcaccctgggtgctaaatcacccatttttccctacttcctttttttttttttttttttttaataagacagagtcttgctctgtcaccaggctggagtgcagtggcatgatctcagctcactgcaacttccaactccctggttcaagcgattctcctgcctcagcctcccgagtagctgggattataggcacacaccagcacaccaggctaatttttgtatttttagtaaagacagggtttcaccatgttagccaggatggtctcgatctcctgacctcgtgatccacctgcctctgcctcccaaagtgctgggattacaggtgtgagccacctcgcccggcccatttttccccatttcatttcctgtctccatgccctcttcttgaccccagtgatggccacgtcttgtttctagaatcccttcctttgcacaagccatattctgaactcttaattccttcccttaacttcaatccctatgtctcctgtcctacctcatggttttcctggccccacacctgatgctcagagcccactgtgaacccctggtgcctctttttggactcggttctcccttctctcccacagaccttcccctcctccaatgagtcccgccaatgccccaatgcccgttgccagttcgccttctacggtggtgagtcgggctaccaccgggccctgctgggcctgcagatcttcaatgccttcatgttcttctggttggccaacttcgtgctggcgctgggccaggtcacgctggccggggcctttgcctcctactactgggccctgcgcaagccggacgacctgccggccttcccgctcttctctgcctttggccgggcgctcaggtgggctggcgttgcaggcaggatggggtggaggacgaggcctggcccagccaccgaccactccctcggcccgcaggtaccacacaggctccctggcctttggcgcgctcatcctggccattgtgcagatcatccgtgtgatactcgagtacctggatcagcggctgaaaggtacgtcccacccacggttcgcattagctcctgttgcggggcgaggctgaatagcgaaccaggattgggtcttgcttggaggtgggcggggccaagataatagagcagtgatgggtttctgtctatgacggggtggagttcaggagttggcgtgattgagtcctgcgatggaggagcaaaccagagaacctactgggtggaattcttgctgttgaggggacaggcccaagaggcctggcccaccattggttattaccagagtgaattggagtggtatatatttgcgctgaagagagcaggaataagactggtttattagccgggcgccgtgactcacgcctgtaatcccagcactttgggaggctgaggcgagcggatcacctgaggtcaggagaccagcctggccaacatggtgaaaccccgtctctactacaaatacaaaaattagccaggcatggtggtgtgtgcgtctgcagtcctagctacacgggaggctgagacaggagaatcacttgaactccggaggttgaggtttcagtgggccgagaccgagcgactgcactccagcctgggcaacagagcgagactccatttcaaaaaaaggaaaaaaaactggtttatttttcttagaggaagggctctggggctgggattgatggtactttgttttagagacaggatctctcaccctgtcacccaggctggagtgcagtggcaccatcatagctcactgcagcctcaaactcctgggcttaagtccctgtctctttgacagcgtggactcaggagacctggacattggcaagtgtgtgtgatagggaagaggggatcccttccaagtcaggctggtgtcccctcacttccacatcccttcccttctcttccagctgcagagaacaagtttgccaagtgcctcatgacctgtctcaaatgctgcttctggtgcctggagaagttcatcaaattccttaataggaatgcctacatcatggtgagtgggcctgggacccccaaccaacccgccagctcctgctgggtgagaggaccaccccccatgcccacccagtgggtctgatctctccctcccactctcctccagattgccatctacggcaccaatttctgcacctcggccaggaatgccttcttcctgctcatgagaaacatcatcaggtcgggaatcattatcatcttcctcctgccacccgcctcttcccctagtccctgaagccagcattcacacctgcccctcactgtcccctgcagagtggctgtcctggataaagttactgacttcctcttcctgttgggcaaacttctgatcgttggtagtgtgggtgagtgccgcccacctagcctctcggggtgtgggagcctgatttctgtcttctgtgatgagtgtcatcttcttaggaggctgtttcctatatccagaacccttcgccatcttgctttcttctccttctccagggatcctggctttcttcttcttcacccaccgtatcaggatcgtgcaggatacagcaccacccctcaattattactgggttcctatactggtatggacctctggggagagatgggggtttgggaagaaagaggtgttgggatttgcttggtcttctttgactagataaatgtggatagaggtcagaggtggggaattgattatttattcagaccacaaactttttgtttgtttttgaatcaagagtcttgccctgtcgccctgactggagtgcagtggtgcaatcttgactcactgcaacctctgccttccgggttcaagcgaattctcgagcttttgcctcccgagtagttgggattacaggtgcctgcccccacacctgcctaatttttgtatatttattttttaattttaatttaattttttttttgagacagactcactctgttgcccaggttggagtgcagtgaaatgatcttggcttactgaaaccttcacctctctagttcaagcgattcttgtgcctcagcctcctgtgtagctgggattacaggcacctgccaccacacctggctaacttttttttttttttgagatggagtttcactcttgttgcccaggctggagtgcaatagggtgatctcagctcactgcaacctccgcctcccaggtttaagtaattctcctgcctcagcctcccgagtagctgagattacaggcacgagccaccacgtgtggctaattttacatttttagtagagacggggtttctccatgttggtcaggctggtctcgaactcccgacctcaggtgatccacccgcctcagcttcccacagtgctgggattacaggcgtgaaccaccacacctggctaatttttgtatatttaatagagatggggtttcaccgtgttggctgggctggtctcaaactcctgacctcaagtgatccgcccgcctcgggctcgcagagtactgggattgcaggtgtgacccaccacgcccgacctcagaccacaaacattatcaagcacctactgtgtgtcaggcatcgaggtggagggcttccctctaaaggccttagagtttgggggtaaacagatactcctccataatgatattggtgaatgtatgattgcaaactgggacatgccacgagtatgtctgtatagcacagggaactgtttgaaactgtggtgggggctgggcaggtgtggggggggtccaggtggtgccatgcaggtgatgttggatctgagatctgaagctgcaggcaatatccaggcagagggaacagtacagtggccctgaggtgggagtgtgccaggaagcagtggggctgacgtggaaggagtaaagaagtggagataagggccaggcaccgtggctcacacctgtaatcccagcactttgggaggctgaggcaggtggatcacctgaggtcaggggtttgagactagccttgccagcatggcgaaacccagtctctacaaaaaaaatacaaaaattagcggggcgtggttgtgggcacctgtaatcccagctactcgggaggctgaggcaggagaactgcttgaacctgggaggcagaggtttcagtgagccgagatcgcgccactgcactcgagcctgggtgacagagtgagactctctctcaaaaaaaaaaaagtggagatacggccaaggaggttaacaaggctgtggagggattgagccttcattgcaagggcagtattgtatctcagtgtaggtcttgaagcccattgacctagtttcttattttagttcctctatttagtagttctaagatgagtaagagtaatcttgggcaaattatttaatcctctaaggtccactgacttttttttttttttttttttttctgcgatagagccttgctctgtcacccacgctggagtgcgatggagtgatctctgctcaccacaacctccacctcccgggttcaagcgattctcctgtctcagctccctgactagctgggattacaggcatatgccactgtgcccggctaatttttgtatttttagtagagacggggtttcaccctgttggtcaggctggtctcgaactcctgacctcaggtgatccacccacctcggccttccaaagtgctgccaataaaggcatgagcccctgtgcctggccatttcattgttttgaatttttaatttaatataatagagataggccaggtgttgtggctcaggctctactataataacaataataatagaggcagtgtctccctatattgccaggctggtcttgaactctggactcaagggatcctcctgcctcagcctgccaaagtgcaaggactacaggcatgagccaccacgcccagccaggtccactgacttcagtcaacaaatgtttatctagcagctaccaaggccgtgtgagtctccagattgctagggatgcagcagtaaatgggactgggtctagtgaggatgtgagcattaaacctgaaagccctaaacatgcataaaattgcagctgcaccaagagctcaggaggggtgcccagtgctaggaggacataaaataggctctagaggccgggcatggtggcccacacctgtaatcccagcactttgggaagccaaggcaggcggatcatgaacgtcaggagattgagaccatcctggctaacatggtgaaaccccatctctactaaaaatacaaaaaaattagtcaggtgtgctggtacgcacctgtagtcccagctactcaggaggctgaggtaagagaatcgcttgaacccgggaggtggaggttgcactgagccaaggtcccaccactgcactccagcctgggtgacagagcaagattccgtctcaggagggaaaaaaaaaaggctctcagccagacgcaggggcccacatgtataatcccagcactttgggaggccgaggcaggcagatcgcttgagctcaggagtttgaaaacagcctgggcaacatggcaaaaccccatctccacaaaaaaatacaaaaattagctgggtatgctggaacatgcctgtagtcccagctccttgtaagcctgaggtggaaggatcacttgagcctgggaggtcaaggctgcagtgagctgagatggggccactgcactctagcctgagcaacacagtgagaccctgtctcaaaaaaaaaacaaaaaaaaaacgcccactctaggtgtcgtaggtggtttcctggaggaggtgggacttgaggacttgctctttgagctgaaagcagaaggtcgatggggcataaattagatttaagtcaggacaatagcacatgcagaggcccaggggttaaagaaagcaagggtgaggctgagtgcagtggctcatacctgtagtcccagcacttggggaggccaaggtgggcgaatctcttaagcccaggatgggtaatgggtaacgtggcaaaaacccatctctacaaaaaatacaaaggttagccgggcacagtggtgcacatctgtaatcccaactactccggaggctgaggcgggaggatcacttgagcccaggaggcagaggttgcagtgagctgagattgcaccactacaatccagcctgggctacagagtgagaccgtgagaccctgtctcaaaaaaagaaaaaaaaaaaaggccgggtgtgcggtggctcacgcctgtaatcccagcactttgggaggctgcgaggcaggtggatcacctgaagtcaggcgtttgagaccagcctggccaacatggtgaaaccccgtctctactaaaaatacaaaaatgagccaggcgtggtggcacgtgcctgtagtcccagctcctccggaggctgaggcagaattgcttgaacctggaaggcagaggttgtagtgagccaagatcgtaccatggcactccagtctgggcaacagagtgagattccgtctcaaaaaaaaaaaaaaaagacggagagagagaaagaggattttgtgtggatggtggggccctgccagcgggggtgaggggttgggatgtcactaatccaaagagggtttctcagcaggggaaggatgtggtcccagcataggatggactcagggggtgggggctgctctgggaaggacacggagcagggacagctcgtttctccttgcccagacggtgatcgttggctcctacttgattgcacacggtttcttcagcgtctatggcatgtgtgtggacacgctgttcctctgcttctgtgagtgacccctcaccccaaaccttgctgggccccgaatcccttctttccactgggcatcacatcaccctccaacggggcaacacgcttgcctgcccccagcttccccagggcttggctgtccctcgtcctgggtccccagcctgtcttcctggtttccttttgcgcttagaagcagctccgacctcctgtccactggcccaggctgcagcctggacgctgccctggagcccgcccgcgcttcgcagtttctggctttgactggggggaggggatctgtggctgccactaactctggtctctccatctgttttttttgtttgtttttttcttctctcttcctctcctccatgcctgctggcttccctgttcttccctgcctccctctttccctcccttcccgaccaccccattttccccctgccggttcccggggggagcccaggtgaggacctggaaaggaatgacggctctcaggagcgaccctacttcatgtcgcccgagctgagagacatcctgttgaaggggagtgcggaggaggggaagcgggcagaagccgaggagtagagagtgagggagactggcgtgggggccaggtttcctccatgtagactgggggtgcatgaagcgggggggttcctggcctgcgagtgtggggatcctgtgtgtccctcggagcccactacagtctgcccctctctggtcccagtgtgtctgctttctaaccctctgaggcttctctgtgaccctcatccacctaccctgtccttgaggcccctgcccgtgggctcccctcatgcctcctgctctgggacctctctccacagtggaggacctggagaggaatgacggctcggccgagaggccttacttcatgtcttccaccctcaagaaactcttgaacaagaccaacaagaaggcagcggagtcctgaaggccccgtgctccccacctctcaaggagtctcatgccgcagggtgctcagtagctgggtctgttcccccagccccttgggctcacctgaagtcctatcactgccgctctgcccctccccatgagccagatcccaccagtttctggacgtggagagtctggggcatctccttcttatgccaaggggcgcttggagttttcatggctgcccctccagactgcgagaaacaagtaaaaacccattggggcctcttgatgtctgggatggcacgtggcccgacctccacaagctccctcatgcttcctgtcccccgcttacacgacaacgggccagaccacaggaaggacggtgtttgtgtctgagggagctgctggccacagtgaacacccacgtttattcctgcctgctccggccaggactgaaccccttctccacacctgaacagttggctcaagggccaccagaagcatttctttattattattattttttaacctggacatgcattaaagggtctattagctttctttccgtctgtctcaacagctgagatggggccgccaaggagtgccttccttttgctccctcctagctgggagtgacgggtgggagtgtgtgtgcccaggtgggggtgtctcctggctgggaaggagggaaagggagggagagttttgcgggggttggcagtggagagcaggctggagaggagatggctaatagctgtttaatggaaacctgctgggctggagggagttaggctgaatttcccgacttcctctgccagttattgacacagctctctttgtaagagaggaaagaaactaaacccacccaagggatgatgtcagggggagaggtggagggcagatgtcctgggcaaaccgggcccctctgcccacacacctcacttgatccttttgccaaacttgtcaaactcaggggaactggcttcccagttgcccctttgccatattccaagtccccctcagacttcatgtctctgctcatcagcactgtcccaggatcctggagagggagaactcctggccccaggggaaagaggggggggtctcccgtttcctgtgcctgcaccagccctgcccccattgcgtctgcacacccctgcgtgtaactgcattccaaccactaataaagtgcctattgtacaggtccaggcctggtgtgtttgttgggggcagtgagccagtggcggctggtagggggaaccccagcttccaaggccctaggagtctctgaactagggcgattctctcaaagggaacgaggagggggcaggaaacccactggctgctggctctgcctgaattccaaccttcaggcagctcagatttcccgattaggctctaatccctggactccagaaggcagaggcagcctgtccacctccgccatcacccatcctggacacacgcccccaggcctcccctctctcagggcccaggcacctgaggtcctgcagtcactatgctccccagctactttggatctgcgaagggactgactgcccttggggtgggccccactgcctggaagctcgctgctgccccctcgtgccagctgccagtgtcagtcacctccaggcaatccgccccaacatttcaattctttccacctcctctcagggaatttttcttcaatatccacttttttttttttttttttttttcagacagtcttgccctgtcacccagggtggagggcagtggtgcgatctcggctcactgcaacctccacctcccgggttccagcgattcttctgcctcagcctcccgagtagttgggattacaggtgcctgccaccacgcctggctaattttttgtgtttttagtagagaccaggtttcgccatgttgggcaggctggtctcaaattcctcacttcaggtgatccgctggcctcggcctcccaaagtgctgggattacaggcgtgagccacctggcccagccttttttttttttttttttttttgagacaggatctcactctggctgaagctaaagtgcagtggtgcaatcatggctcaccacagcctcaggtgatcctcccatcttagcctcccgagtagctgggactacaggtacacaccaccacacctgactaatttttgtattttttgtagagattgatttttaccatattgcccatgctggttttttttgtttgtttgtttgttttttgagacagagtctccctttgtggcccaggccacagtgcatagtgccacagtgcagtggcacagtctcagctcactaaacctcctggattcaagtgattctcgtgcctcagcctcctgagtagctgggattacaggcgcgtaccaccacatccagctaatttttgtagttttagtagagacggggtttcaccatgttggctagcctggtctcaaactcctgacctcatgtgatccacctgcctcggcctcccaaagtgctgggattacaggcatgagccaccaagcctggccagcatttttgtttgtttgtttccaagaaggcatttgaacccaggtcttggctccagagtcctcaagttctaccctatgctggcactgaccccttcctcgatgcctttgtttccctggatcctttgaatctggcattttattcagccccagctcctgttaccatgcccacctaaaaaatagctcctggcggccgggtgcggtggctcatgcctgtaatcccagcactttgggaggctgaggcgggtgaatcatgaggtcaggagtttgagaccagcctggccaacatggtgaaaacctgctgctactaaaaatacaaaaattagccaggcatggtggcacatgcctgtaatcccagctactcgggaggctgaggcaggagaatcgcttgaacccaggaggcagaggttgtggtgaaccaagatgacaccattgcactccagcctgggcaacagagcaaaactctgtctcagaaaaaaaaagaaagaaagaaaaagatttgtggtacgatacatatagcataaaatttgccatctccatctctttcttatttattaagccactgggtctcactatgttacctgggctggccttgagctcccggactgaagggatcatcccgcctcagcctcccaagtagctgggatgacaggcactcgccactgtgcctggtttatgtttaattttttgaggaaccaccatagtgttttctggcttcatgctttggctccacttctgggttggcttcactctctgccaagttcctttatctgggtatattccctgcctccaaccacactgtgctgtgatagttaattttaggtgtgaacttggctggattagaaaatactcagatttgagctgtgatgtggtaaaaataagacaaagaaaaaaaaaaaaacagtggctgggctccgtggctcacgcctgcaatcagcactttgggaggccgaggtgggcagatcgcttgagcttgaattcgagaccagcctgggcaacatgtggaaagcttgtctcaacaaaaactatgaaaattagcagggtgtggtggtcatgcacatgttgtcccagctactcagtaggatgaagtgagaaggtcactttagctcagggggtggagggtgcagtgagctgagatcacactactgtgctccagcctgagcgacagagcaacacgtctgataaagcattatttctgggtgagcgccatccaacttgctggggctccgacagaacagaaaaaggagagaaagcattttcctcctcagaactgggacactcttctcctcctgtcttgacactccaagacttataccagtgatccctggttctcaggccttcggccttggactgggaattacaccattggtgtccctggctctgaagctttaggattcagactgagcctcgctactggctttgcagggtcttcagctactggagctgctggcttttcagggtctgcagtcaatgcatgtggtaggacatctcagcctccatgatcacatgagccaattattctgctaaatcccctctcatctacctacctcctattagctttctcggagaaacctagtaatacacacatcatacattttcctggcctttttttttttttttttttttttttgagatggagtcttgctctgtcactcaggctggagtgcagtggcacgatctaggctcactgcaagctccgcctcccgggttcacgccattctcctgcctcagctcctgagtagctgggactacagctgcccgccaccacccccggctaatttttttgtatttttcgtagagacagggttttaccatgttagccaggatggtctcgatctcctgacctcatgatccgcctgccttggcctcccaacgtgctgggattacaggcatgagccaccgcacgcagctacattttcctggctttaagatgagaagtcttctctttttttgagacggagtctcgctctgtcgcccagcctggagtgcagtggcatgatcttggctcactgcaacctccgcttcctgggttcaagcaattctctgcctcagcctcccgagtagctgggattacaggagcccgccaccatgcccggctaatttttgtatttttagtagagatggagtttcaccatcttggccaggctgctcttgaactcttgaactcttgatccacccacctcggcctcccaaagtgttgggattagagggccagaaaagtcttttcttgctcctaagtctcaggcctggagctcactgactctgaccagcctgattatgatcatttactcattgtaaatcattgagtcaatcattgtagtcaaggtgtgggcctagtttgggagtcaggcagcagggacctgccatctagactacagtttgatcaagggagaggaatggttccccaacaactgtggtcatcccacagtgtccatcccagagtggtcacccatgtccaccctgggggggggcaagaagggaacaggcataggacaaaaagctttcgagagggaagttaactgggtgtgattgggagagtgggtggaatctttcaagatgaggaagacaatgaatagagaggctgtaaggacagcagagtcactgagagtgacaggacctgtctagactgacagattacaagagggggatgacctcaatcttcaaccaatgagtgggagggagggaagagagaaggaatagccagatgacagatgatgtcactaaggcaaggaggagagaatggtgttgtatacagggtttgtgaccactgagtggtggaaggacaagggcagaggtgcgaggtcgggtcagggtagcagttcagcaagacagggcagatggcatcttgtgtcttccatcctttacggtgaccagggactaggaacctgatggatggggtttattggaaagttgggctgaaaactttttacttcaaaaaatttttttctttttcctttttttttttttttgagacgaagtctcactcttgtcccccagtctggagtgcaatggtgcaatctcagctcactgcaacctccgcttcctgggttcaagtgattctcctgcctcagcctcccgagtagctgggattacaggtgcgtaccaccacgcccagctaattttttatattttaaggagagatggggtttcaccatgttggccaggctggtctcgaactcctgacctcaagtgatccacccgcctcggcctcccaaagtgctaggattagagggtgaaccaccacacctggccctttctttttttttttagacacagtctccctgtcacccaggctggactgtagtggcttgatctcggctcactgcaacctccacctcccaggttcaagcgattctcgtgcctcagcctcccgagtagctggaattacagatgccagccatcatgcccagctactttttgtacttttagtaaagacagagtttcaccatgttggccagggtggtcttgaactcctgacctcaagtgatccaccaatctcggcctcccaatgtgctaggattacaagtatgagccactgcccccagccttctttttgtttttattcttgaaaactttttttttttttaatgtagagatggggctgggtgcagtagctcatgcctgtaatcccagcactttgggaagccaaggtgggtggataacttgaggtcaggagtttgagaccagcctggccaacatggcaaaacccagtctctactaaaaatacaacaattagctgaccatggtggtgtacgcctgcaatcccagtgacttgggaggctaaggcagaattgcttaaactcgggaattggaggttgcagtaagctgagattgttatcactgcaccctagctgggactacagaacgagactccatctcaaaaataaataaatagatagatagataaaaaacatagagatggggtctcactatgttgcccagactggtcttgaacttctgggctcaagcaatccccctgcctcagcctcccaaagtgtaggattacaggcatgagccagcatgcctggccaagacaacatttttcaggaagttctggttggatggggcacccgttcaagaggtaacaatcataaccattactgtttttgaagctttaactccatgccaggtactgaagcaaccccttgatgttgaattaactccgaatcagtcctcctccaaatcaaaccctaggaggtttgggtttgatccaaagactgtgcttgtcatcatgaccctatccgccctttactgtgtttggggtccctggggcaagaaacgccttagcggaatgagatcttcaaaagcgttttaagtaaccttaggctctctggagttgggagtcagaaaactagtaaccatcctcgttctgccatttggcagtgctgttagctcaagcaagtcactaaaactgacctgttccgaaaaaaagccagtctaggctttgttattaacattcgttattatcacagtgaccttcaacaatttaaagctttaaccaattttttggttttgtttttgtttttttgagacagggcttctgttgcctaggctagagagcagtggcccaatctcagttcactgcagcctcaacctcctgggctcaaatgatcctcccacctcagcctcctgagtagctgggactacaggtgtgttccaccatgccctggcattttaaccaattttatcttagtgcatgccccaatcatcttaccaaacctttcttcaatttccagctctatttgtgagacagatctgaggcacaggaaatgaaattaaaaagcctggtgcagaataacttatcaatttatgtgaaaaacaagaatatgattatgcacctctgaaaataaaactctactgtagttacacaaaaaactgtacaatggctggtcgcggtggctcacgcatataatcctagcactttgggaggccgaggcgggtggatcacgaggtcaggagatcgagaccatcctgactcacccggtgaaacccagtctctactaaaaatacaaaacattagccgggcgtggtggtgggcgcctgtagtctcagctactcgggaggctgaggcaggagaatggcgtgaacccaggaggcggagcttgcagtgagccaagatcgtgccactgcactccagcctgggagacagagcaagactccgtttcaaaaacaaaaaacaaaaaacaaaactgtacaatggcttctaagagggagggaactggatgtctgaggaagactttgtgctctcatgtctttggcacttttttttttttttgagatggagtctcactctgtcgcccagactggagtgcaatggcacgatctcagctcactgcaacctctgcctcccgagttcatgccatcctcctgcctcagcctcccgagtcgctgagactacagatgcccaccaccacgcccggctaatttttttttgtatttttagtagagacggggtttcactgtgttagccaggatggtcttgatctcctgacctcgtgatccgcccacttcagcctcccaaagtgctggaattacaggcgtgagccaccgcgcccggcgtctttggcacatttgacgtatcatgtgactatgctacctattaaaaatccacagtaaaatgtaaataaaatagaaaagcagagggtacagcatgcactcatttcttttttgagacggtctagctgtgccatccaggctgaaaagtgcagtgactccatcacggctcactgcagcctggacctccacagctcaagtgatcctcccacctactcctcccaagtagatggaactatggacacaggccatcacgctcagctaatttttgtagagactgggttttgccatgttgctcaagctggcctcaaactcctgggcttaagggatcctccagcctcggcctcccaaagtgtggggattacaggcgtgagccaccatgcccggctaggcactcatttctgtaattgttgcaggaaacaaaggaccagagagactgacacgggaaacaggaggatttatttagatgtacaccggctcagtggatttgtatctgaaaagctgaccattgaacaaagactgagtgtggtttttataggcaaacttacagaagcaaaacaaaagcagttaatgatacagtcacaggtcatgtaatctatagcataactgctgacttagcataacttgtggctttgcacagctgttggccttgcagctgtgtcaaaagaaaaacagagtctacaaatcttactaaatacaaccattggcaaacagtcatatttaatggttcagaaaaggagagacagtaaaggaatttttcttttcaactttgctccggaggaggctgtctggagcccattcctttggcctcgacttttcagtgttataactgtccttgaagtaagctggctaagcagaggaaaacttgttcttgttttctttttaacccttaccccctgccacataatcacatctttacacttcttttttttttttttttttttttttaagatgggaagtcggagtctcgctctgtcgcccaggctggagtgcagtggtgccatctcggctcattgtaacctctgcctcccaggttcaagtgattcaagccattcttgtgcctctgcctcctgagtagctgggattataggcgcacaccaccacacctggcgaatttttttttttttttttttttgaggctgagtctcactctatcgcccaggctggagtgcaatggagcaatctcggctcactgcaacctccgcctcctgggttcaagcgatcctcctgtctcagcttcctgattagctgggattacaggcgccctccaccacacccagttaatttttctatttttagtggagacggtgtttcaccatgttggccaggctggtctcaaactcctgacctcaagtgatccgcccacctcagcttcccaaagtgctgggattacaagcgtgagccaccacgcccagccaggaaacccattttcaacacctccttgctcttttttttttctgagacagagtctcgctctgtcgcccagactggagtgcagtggcgcaatctcggctcactgcaacctccgcctgccaggtcaaacaattctcctgcctcagcctcccaagtaggtgggactacaggcatgtgccaccacacccggctaattttcttttgtatttttagtagagacggggtttcaccatgctggccaggctggtctcgaactcctgacctcgtgatccgcccgcctcggcctcccaaagtgctgggattacaaacgtgagccaccgcgcctggccttccttgctcttcttgctccaaatcctgggaacgtctgaatcaacaggcggacatctgtcaaaccttcctagcaactacgcctgcggatggccaacctgaccctggaagacagtggggtttagttaagcacagattgtacatcgggggcctcataaggcgcctggaagcattcaagaacaccacgcttgtaaggacaaagcactcggtcacgggcgcctttacttcggagctccgcgctgctgctggacgagcgtccgttgagtcccagccccaatttttccaggaaatggcggtgagccctctagtgagatattttttggcctgggcctcagtttctccatctgtcaatgggggaaggggaaggcgggctagaggaccccgaccaggtcggctgcagccttcggaagctacggcccagggacgccacaccaaggcaggtctgcgggacgaaagaacccaagaacccgggcgcgcattggcgccggtcccgggctcaaggggcagcaacgaggagacgctggacctggccgttcctcgcacacatctctaaccttctgtgcctctcaagggagatggggtgagcatagccacctccactggagcccgaaaatccccggccgagataccgccactaaaaaggtacacatgcgtcaaagcctctcggagccatttccgctaacgtactcagggcgacgggcgtaagatggcggccgcgcaggcgcaaaatgtcgcagccgtagggaggctccgcctctgacgcttgccttgcatcacgtggtaatggccgctcaaaaaacgccttagcgaaaaccagagcgtgccctcgtcacgtgatggaggactcccagtacggcaaagggaaggcgccaaaagttgtcagatggcgaaggaaaccgcgaaattcgccattgtcacatgatggagcaacctatcgaaagcggagggaaaggtgccgaagtcacgtgactacgcacgcaaacactcccgcttgcaccacgtgcaactcacgcccaccccctcagccccccccttatctcttttcgcccctccctcccatttgggttgggcctgcgtcgaggcgcaacgcggcgtcaaagggggcggggcttcagccggtcacgtgttcccgcacctccccggcgcgcgcctgcccgcccgcccgctcgcccccggtccggactcctcctcctcctcttctcgccattgcagttggacccagcagcccggcgcgcaccgcgtggcttttgggggcagaccccggcgggctgtggcaggagggcggcggcggcggctgcggtcgaagaaggggacgccgacaaggtaagcgtcaatgtggcggcggccgggcccgctcccgcctctgcccctccccccgcccgccctcagtgagatccccactgagggttcgcggtgacaaggctggagggatcccacgctcgccgcctccgcccggttccctcatcccggcgcctggcccgttcctcccttgccggcctcgctcccgcgctcggccgttaactctcttccattgtgcggaggaaacaaaatggcggctgcggcggcggcgaggactcggtgcgcgcgcagccgctcccccccgcacgcggcccctcggccggcggcggcgccacgcgcgggggggtgcgcgcgcaccgggcccccggctgccgcctccccgcggctgggcttttgtctgttgcgggggtcctggggacgcgcgcacgtgcttggagcacacaccccctcgggtcccgagttccgcggcggggcgaccccccttcctcactccttccctaccccctcctcctctttgtcccggtcccgcccccgattccaggagagtcccaggttcccgaggcgggaaaagtcgcctcctttgtcctcacaggtcgcggagaggcggaccccctccttggaagccccttcccacgcggattgctgaggaagcctttgtgggttcgtcgggtttccaaatctctggtcagccaggcctctctcagatcagggtcaaaacttgagagggtttcagctttttctttagttagtttgttttcattgttgaatgtttttccagattgttagtatttgccttctctagaccggcaatctacttgggtgcaagcctgggccccgaaacgtggatgcttaaaacccatttctacctttattttctcaagtagttgaacgattgagattctcgaggttactcatgaggttctgccccagttaattcaccgcctggatgaattatttggggtgtacggcggtctgcatgctcctcccccagttcagtggccaaatttgaggagaatgagggatctcttctccacatttccaacattgtttgccagttgctgcttaggtgacatggatcagcaacgaagcgtcggtttcagtggtttctttttctggactccggtaattcactgctgctgaatctttttcaagattttgctctctttaaaatgagtggtgtgatggcatatttgtggtccacatggaatcgcgaggtgccatccgaagttaggattcaaatttaggactttaagctctcttttcctcaggtatttgtggatgggaatctccatggattgctcagagtgctgccactgtcccttgtgcgtgatgctttgtgtgtggtctcgtgggatgtagttacagtagccgcccagactgtgaatgaagtgtgggaaccagggcctcattcacagctggaaagcaggaggaggccgcaggacattggcaggtgctcctctccctgttccgtggtgctggggccccttgcttatgtgggtggctcttggtccctgggatttgtgaatggagtctgcaggccccagtgttgtctggaatattctttagttcagattggaggctagcaatgactgccaggcttggccttgccgccactgggcgctatttatcactctccctatcttcctggagcttagccgagtcttcctggagctgagaggtgcctaattgtttgtggtttttctgattgaacttgtttggtgcctctaggcaaaaattcctttggctccttctagtattttcagggtcttgaaggcccatattcctgagcatgaggaatctaagtctgttattttttcctaaattttcatgttaaataccacgttgacaaaggacagctgctaatattttgatcacacagatacagacggtgctccctggttaaggcctccaggtaggggacaggtagagtcagtgatggggaagaagccttctgtaagtccctttcctttgggtagacagtagattaccctttaggctttagcaagatgtgggggttagaagtcttctattcttggaaaagcctttagtcgttttctttgggctggggcctcttctcttagggactgctgtcaccctttctcggtttcttttgattacctttcatggccccagaggagtgatcccttcccttatttatacctcttggacttgtcatcctgctacattttgtcagcaagttaattcaccttgtgcagttttgaaagatgtgtaagtgttaacatttagtattagcatttatggcccaggaaattgtgaccttaatatttgaatcttgcttttattaaacctttacaggaactaggattttgtagggttttttttttttttttttttttgagttagagtttagctcttgttgcccaggctggagtgcaatggcgcgatctcggctcaccgcaacctccacctcccgagttcaagcgattctcctgcctcagcctcccgagtagctggaattacaggcatgctccactacacctagctaattttgcatttttactagagatggggcttctccatgttggtcaggctggtctcgaactccgaacctcaggtgatccaccggcctcggtctcccagagttgtgggattacaggcgtgagccaccatgcccagccttctaggttctgtttattggatgctttttatcttaacaaagtcctggcagagaaagatttgatttgtttccatcaggaagtttggaatctgaggcagatagtggtttgagtgtcatcttcacacaatgaatgagtagagatttggggcctgggaggcacgaggcaaactttagtttcctactgaagcatttgtccgttttatctgaaacaagtagattgccgatctgtattattatacatagtaagctgctgttgaaatggttgtgaaagtagagtaggcaggtaggtggtggttagggggcctcatcggtgctgatttttaagaaatttttatgatatttatgatctgttataaatccttgtgaaacttttccatgagaacacttcacgggtgattccattatgaatagcaattggtggccgggtgcggtggctcacgcctgtaatcccagcactttgggaggctgaggtgggcggatcacgacgtcaggagttcgagaccagcctgaccagcatggtgaaaccccgtatctactaaaaaaaaaaagtacaaaattagccaggtacggtggcacacacctgcagtcccagctattcgggaggctgaggcagcgaatcgcttgtacgtaggaggcggaggttgcagtgagctgaggtcgtgccgctgcactccagcctgtgtgatggagcaagacttcgtatgaaaaaaaaataataacaattggaaattcagatacatttagcatcagctgtatttaggcatcgtgtaaaagtgatgtccagttaaaatttaatttaatttttttttttgagacagggtctcactctgtcacccaggctggagtgcagtcgcgtgatctccgctcactgcagcctctgtctctgaggctcaagaagcaatcctcccacctcagcctcccaagtagctggaaccacaggcacatgtcaccacacccagctaattttttgaattttttgtagagacaggatctttccacgttgcccaggctggcctcagaactcttgggctcaagcaatctgcccaccttggcctcccaaaaagctggaattactggagtgagccctcactcctggccagaatttaccttttttctcttctcattaaatgtttacgtagtgaagacattgaaaatgtagctactagttttttttaaatttttaatctaattttatttttttgtagagatagggtcttaaactatgttgcccaggctggtctcaaattcctaggctcaagtgatcctcctgcagcctctcaaagtgctgggattacagatatgagccgccttgcccagtggcactaattttaagacaaaaatatgtttactgtctgagggccattctcttgtggaatgcgtgatcaccatgtatcatttagtcataaagttgaatgtattacagtatgcaaatttgctccaaattatttttataattttaagtgatagtaagaagttctggccaggcgcggtggctcaggcctgtaatcccagaactttgggaggccgaggcgggcggatcacaaggtcaggagatcgagaccatcctggctaacccggtgaaaccccgtctctcttaaaaaatacaaaaaaattagccgggcgtggtggcgggtgcctgcaatcccagctgctgaggaggctgaggcaggagaatggcgtgaacccgggaagcggagcttacagtgagcagagattgtgccactgtactccagcctgggcgacagcaagattctgtctcaaaaaaaaaaaaaaaagttctactttgcagtgtgaagtacataattttcactgaacatgcccaacagctgtccttatcttttcgaggattttgcttgaagctgaaggttaaggtcttacttagataaagataaaaggtcttggagatgagtaagtcttccaggccactttcttttctgctgcttgcctataaaactagtttctcatatcagagtgttgtttttttttttttttgagatggagtctcacagtgtcacctaggctggagtgcagtggcacggtctcggcttactgcaacctccgcctcctgggttcaagtgtttctcttgcctcatttctcttgcctcagcctcccaagtagctggaattacaggcacctgccgtcacgcccagctaattttttgtatttttagtagagatgaggtttcaccattttgctcgggctagtctcgaatacctgacctcaagtgatctgctgcctcagtctcccaaagtgcaggaattacaggtgtgagtcacaacgccggttctaattttttttttttttttttttttttttgagatgagtctcgctcagtcgcccaggctagagtgcagtggcgcggcttactgcaagctccgcctcccgggttcatgccattctcctgcctctgcctcccaagtagctgggactacaggcacccgccactacgcccggctaatttttttgtatttttagtagagacggggtttcaccatattagccaggatggtctcaatctcttgacctcgtgatccgcctgtctcggcctcccagagtgctgggattacaggcgtgagccgccgtgcccggccaatttttgtatttttatatagagactgagttttcgccgtgttggctagggctatcttgaactggcgtcactcaagtgatttgcctgcctcggcctctcaaagtgttgggattacaggcataagccaccatacctgacctgcagttatttcaaagtaaaaaggttttactaaacagttaacatgtttggatgttagtatttaatgtccatgtgagagatggtctttttaaaaaaaaatcttaactggaaaaatacagttctgggagaagtaaacattgaactgtatactaagtttaaaaaaaataatccaaggcttcgctctgggaatacatggggaaggattgcttctgcctccacccagatatgggaggatctctcaaccatgcttcccttgcccccctgctgcctgagagcatgctggaaagagggtttgataattcccacttgaagtcatgttgaatgtttttctatggtggcagattttaaagcatttctgttggttcatccaagagcagttaatgtttttcttttttttttcctaaggactggctctcactatgttgtccaggccggtcttgaacttctgggctcaacgaatcttcctgcctcggtctcccgagtagctggtactacaggcattcacaactgtacccaatttaatcctcttcatacattgcatttgtagtattgtagttcacaaaacatttccccatagtgccacctttaatccttgctgtctgcagcctgaggcaggtggtattttcatcctcatttttcacccaccaccagaaaggtaagtgatttgctgtaggtcccaaagctgccaggttggagagcccaggggcaaattccaggcttctgactctaggactgtgggcactccacaacactagtgagcctggagtcccgggtctccagaaacatttgaggaacaacttgtatttgccaacttttttttatgagatggagtctcactctgtcgcctaggctagagtgcagtggtgtgctgtcggctcactgcagcctccgcctcctgggttcaagcgattctcccgcctcagcttcctgagtagctgggattacaggcgcccgcccccacacccggctaatttttgcatttttagtggagatagggttttgccatgttggccaggctgatcttgaactcctgacctcgtgatctgcctgccctggcctcccaaagtgctgggattacaggtgtgagccaccatgcccggctgtatttgccaactttttattttgtcaaggaaaatatctttaaattagtgatcattcaccatttccgtttttcataattagcaagattgtctttatcaccaaaactataggaataaaataaaggacagtcctttaagttgaaaatatttactaaaatctttatttctggctgggcgcggtggttcacgcctataatcccagcactttgggaggccgaggctggcggatcacttgaggtcaggagttggagaccatcctggccaacatggtgaaatcccgtctgtactaaaaatacaaaaattagccaggaatggtggtctgtggctgtaatcccagttactcagtagagtgaggcagaagaattgcttgaacccacgaggcggaagttgcagttgagctgagatcacgccactgcactccagcctgggtgacagagcaagactctgtctcaaagagaaaaaaaaaaaaagctctttgatataataatactgttgcagtctgaactatgaaccattgcactggacttcacatttttaaatatttcagaatggcattgatagcaagattttagactggcattgcctcgctcggttgcttgctttttttttttttttgagacggagttttgctcttgttgcccaggctggagtgcaatggcgcgatctcggctcactgcaacctccatctcgcgggttcaagcgattctcctgcctcagcctcccgaggagctgggattacaggcatgcaccaccacaccgggctaattttgtatttttagtagagatggagtttctccaagttggtcaggccggtctggaactcccaacctcaggtgatccacccgcctcagcctcccaaagtggtgggattacaggtgggagccactgtgcccggccggttgctttctaagaataattttcaatgtgcccttgatggcgtgactctgtcaaagttcaaggagtcaccaagactcctagctcaagtgtatcatttcagctcacagcccaggatgggccagctccagaggtcaggaaaccaggaggtgggttgagtctctgaatttcagagcctaatttggtctctctcaagtgaatatccacttcaggaccattccctagagttgctgggaaggctgtaagacttatgaaataccccgaagacaggtggggccatacctgtgagggtgttgccactgtacctgtccattccacaaacatctgttcatccactcatgctgaactaacttgggcatgtttcttttccaacaagtgccatgaacctcatagtgtaattagtgagaggtcagaaagatggccattgcaccacaaacataatgttttgtggttgaagcttctgtaactgcatgttgtgggtgggctggattcaggaacaaaagaaaaatgaatccctgtgtgttaaaccatcccaaaccaccaagaagtcatgtttaaaatcccaatacttcatttaccacttgatcctgccttgggtttgttttcagagaagctgcatgttgctggtgcccaggattgaatcataaaaattgtaagaataggctttgctggtgccaggtttgaataaatgtggttgcaagaacagcattgttcatcgtttcgcagctttcgtttaaagttagattagtaggggcagcggagtgttgcgtgtgggtgggtgctgtaggcttattgccagcagtgtgcctcactaaatatcctcttgaaagggaagtttctgctcaccctgaagactgctggatcagttagtgagacaaattccaagaagctggcttggatgtcaaattggtcttgggctcatagagaggaatggatttgttgccctgaaaaggagcgataactctagtttttaaacatttgttttagttcagataattactgcccttattcattgtgtccacctgagtcagaaagcattgctgctgttgcctggtctaagggaggaggacccaggcatgtaacggactgcatgctggccagttgtggtggtcagagcaagctggaggccagcgaggcccttcaggggtcttttcaagggtctgccttggggagcagaggaagatgaagtgaggcagtcgttatagcaagggcacacccacgtttctcattttgaacagtgaagaaagcagatggaaagccacatgtagggcatttgctgaagacaggtgtgttgggggcgtgtgtgtgtcctctgaggcattttgggtggggcgatattttgaccgaatgataccttgttcttcagtgcttcaatggttgatggggtggctttttttcgagatggagtctctctctgtcatccagactgcagtgcagtggcgcgatctcggcttactgcaggctccgcctcttgggttcacgccattctcctgcctcagcctccctgagtagctgggactacaggcacctgccaccacgcctggctaatttttttgcattttttttgagatggagtctcgctctgtcgcccgggctggagtgcagtggcgcgatctcggctcactgtaacctccgcctcccgggttcaagcaattctcctgcctcagcctcctgagtagctgggattacagacgcctgccaccacgcccagctaatttttgtatttttggtagaggtggggtttcaccatgtgggtaggctggtctcgaacccctgacctcgtgatccacccgcctcagcctcccaaagtgctgggatcacaggcgtgagccactgctcccgtccaatttttttgtatttttagtagagaggggtttcaacgtgttagccaggatgctatcgatctcctgacctcatgatccaccagcctcagcctcccaaagtgctgggattacaggtgtgtgccactgtgcctgatagtggggtgattttctacttctaactctctaatgtgtcacatggctttttttaatagattgtctgtatcaactgggggtgaactttagtcttttaacaattttcagactatgaagtttggatgtaaacacctctaatgtgggaagttagttttttttaaagtatctgtatggagttatggatatatataaatttaatgtgttgaatctgttttattttagtaacatcttttgaaaatgttcaaacatagaaaaaagggtgatacaattttagtgaacacttaggccgggggcagtggctcactgcctgtaatcccagcactttgggaggccgaggtgggcagatcatttgaggtcaggagtttgagaccagcctggccaacatgttgaaacccccgtctctactaaaaatacaaaagttagcctggcatggtggtaggtgcctgtaatcccagctatccgggaagctgaggcaggagaatcacttgaacctgggaggcggaggttgcagtgagccgagatcgcgccactccgctccagcctgggcaacacagtgagagtccgtttcaaaaataataataataaaaaatttaagctgggcgcagtggctcaacgcctttgtaattccagcactttgggaggccgaggcaggcagatcacttgaggtcaggagttcgagaccagcctgacaaatgtgatgaaaccccgtctctactaaaaatacaaaaaaaaattagccaggtgtggtggtgcatgtctgtaatcccagctacttgggaggctgaggcaggacagtctcttgaacctgggaggcagaggttgcagtgaaccgagatcgtgctgttgcactccagcctgggcaacaagagttaaactgcacttcaaaatataataataataaaataaaaaatttaatgaacacctacctgtatgcacagcctaggttttgctgtgggcatttaactgcttgtgtttcacatatttgtccatccacttataattcttttcacttttcactttattgattgatcagagacagggttacacttttgttgcccaggctggagtgcagtggtacagtcatagctcagtgccatctcaaactcctgtgcttaagcagtcctcgcgtctcagcctcccaaagtgttggggttataggcgtgaaccactatgcctggccaaatatatgtatatatatttttgtatatatttttttaaattttatttttgttttttattttatttttatattttgagacagagtcttgctctgtcgcccaggctggagtgcaatggcgcgatctcagctcactgcagcctcagcctccctggttccaacgattcttctgccttagcctcctgggtagctgggattacaggtgcactccactacgcccagctaatttttgtatttttagtagagacagggtttcaccatgttggtcaggctggtctcgaactcctgacctcaggtgatccacccacctttggcctcccaaagtgttggtattacaggtgtgagccactgcgcctggccactttattttgatgatgcatttcaaactaagtagcaggaagttgcaagtcttccctctacatattattaactagaatttaatatttatttacagttcttttttggggtggcgggggtcagggtctcacacactttttttgcccaggctggagtgcagtagcacagtcttggcttactgcagcctccatctcctgggctcaagtgatcctcctccctcagcctcctgagtagctgaaattaacggcaggtgccaccatacctggctaattttttttttctttttttttaagaaggagtttcgctcttgttgcccaggctggagtgcaatggtgtgatctcggctcactgcaacctccgcctcctgggttcaagcgattctcctgcctcagcctcccgagtagctgggactacaggcacgtgccaccaatgcccagctaattttgtatttttaatagagacggggttttgccgtgttggttaggctggtctcaaactcccgacctcaggtgatccacctgcctcagcctcccaaagtgctgggattccaggcatgagccaccgcgccctgcctacctggctaatttaaaaaaaaatttttttggagaccaggtctgattatgttgcccaagttggcctcgaactactgtgctcaagtgccttggcctcccaaagtgctgtgataacaggcgtgagccactgctcctgcctcactttatttttatgatgcatttccaactaaataacagaaagttctaatcttccctctacatactaacaagaatttagtatttatttgcagctaggtttttatttttttctttaaaaattttttttgtagattcactcaggctggtcttgaactcctgacaagtgctgctcccaacgtggtgagccaccatgcccagcctcttttttctttttaaataatgcacagatctttagtataccagtcagtgaattctggccactgcatatacccaactcttgtcaggagggagaatgtaaccttcatctcagaaagcttgggagggccccttcccatgtgatccctaccaccgttccccagaggctgtcccatcactgattagtttcgcttattctagaactttatgtaggtggaagcatgattctttttgaatttgttccaaatgtagccagtgggacacctcacaagtcagctccgatgtcctcaggacaagactgctatagtcaccagtgctttgttgctttctggcgctccggtaggatccaggctcacttggtatatcccctgctgcagattacggtccacttctcccgggagctgctttcagtaggtttttgttgttgttatatttttgtttatttatttatttcgagacattctcttgctgtgtcaggtaggctggagttcagtggtgcaatctcggctcatggcagtctcctccccagttcaaggaggtcaaggagttcaagaccagcctggtgaacatagtgaaaccctgtccctactaaaaatacaaaaattcgccgggtgtggcgacacacacctgtagtcccagctactagggaggctgagacaggagaattgcctgaaactggcaggcagagattacagtgagccgagatcacaccactgcattccagcctgggcgacagagcaagactctctcaaaaaaacaaaaagtgttggctttgcatcgtggctcacacctgtaatcccagcactttgggagactgaactgggaggatcacttgagcccaggagtttgagaccagcccacgcaacatggcagcaacccatctctacaaataattaagaacaaaaaatctattatggaatttttaaaacatgcacaaaagaattacagtatccatcacccagcttcaacagctgtcagtgttctacagtcttgtttcatccttctctactttcctttttttttttttttggagacggagtcttgctctgtcgcccaggctggagtgcagtggcacgatctcggctcactcactgcaagctctgcctcccgggatcatgccattctcctgcctcagcctccctatagctgggactacaggcacccaccaccatgcctggctaattttttgtatttttagtagagacgaggtttcaccgtgttagccaggatggtctcgatctcctgacttcgtgatccgcccgccttggcctcccaaagtgctgggattacaggcgtgagccaccacgcccggcctcatccttctctactttctgctccctggtatatttcagagcaaataccaggtatataattttagccataaatttgtcttaaatatgtgtggaacagttaaagttggttctttccagcacaaccacagtattattcccctaactgaagtaactataattccttcataaggattcacttcatgaacaagattcccagtgtcgttgcgactatccagggaaaccatagccaagggaacaggcttggcagaatcagtggcgaaagaaggccctgtggagcttgactctggctcggtgaagagacatgggtgatggaggagaggatgccctttgcacacacatcactcacgcctggccctcattgcagcctgggaaggcagatttttttcaacagtaggatctagtaccaattgttaggtctatgggatatgtgctgcatgcttcaagtaggttgacttgtttcattttcctagtcctgccgagagtagaggggcctcttccgtgttgctaatgcaagaaggaagctagtggctgggcaagtggggtttcaggtccaagtctgtgcagaagctttccttgggcgatcgatcgagtggcttgccccatggtgtgagtctcaggcatgttgagccactgagcccagggactggctttctgcccttttcatcccatgccccctcacactccttccctcctgcatccctaccctgacatgaagcctttgacctcaccatgtcctgttgctgggctttgcaggggcatcatttgactcctaggggttttttgttttgttttgttttaaatgagacagagttttgctcttgtcacccaggctggagtgcaatggtgtgatctcgactcaccgtaacctccgcctcccaggttcaagcaattctcaggcctcagcctcctgaatagctaggattacaagcatgtgctaccacacccgactcattttttgtatatttaatagagacagggtttcaccatgttggccaggctgatcttgaactcgcgacctcaggtgatgcctctgcctcggcctccctaaagtgttgggattacaggcgtgagccaccgcgcctggtgacccctaggttttatttatttatttattgagacggagtctcgctctgtcacccagggtggagtgcagtggcgcgatctcagctcactgcaacctctgcctcccgggttcaagtgattcttctgcctcagcctcctgagtagctgagacaacaggcatgtgccaccacacccggctaattttttgtatttttagtaaagatggggtttcacagtgttagccaggatggtctcgatttcttgacctcgtgatctgcctgccttggcctcccaaagtgctgggattacaggcatgagccaccgcacctggccggttttatttatttattcatttattttttttgaggtggagactctatttgccacgcaggagtgcagtggcgcaatctcagctcactgcaacctctgcctcccggtttcacgctgttctgcctcagcctccctagtagctgggatgacaggtgcacgccaccacatctgtctaatttttgtatttttaggagagatgtggtttctccatgttagcccagctagtctctaactcctgacctcaagtgatccacccaccttggcctcccaaagtgctgggattacaggcgtgagccacctcgctcaagcacccttaggttttaaagtttaaccttggggtgtttaaattttgcagttagatttgctaggtagtcctgggtattttgggaagttcttgttttggcagcatgtcagactttatccttgatgcttgggcctttcaggtttgagcctgctctgctggctcggaactagtttagtcggaaggggctggcagttgcctgtagggggtagattcatctggtgtgtattatgctgatggggttttttggttgtttactcatttggaagatttcagtatggaccagactgtttgtgtagagtgggaattgagtaggttggagtcggcatgattctgagaccgaaatagtaattatggcttcgtttgtcctgaaggattctgtcgtgcacttcagttgtctcagcctcttcagagttgaacgtgatgtggttgtcatcgtccacctgatatttcaaatgttcacttttcgggaggttctttctttttcattttacagaagccttttgggaccctttgtcatatgtctttcttccttccacctcttcattaccatcagaggtcagagctccttccctctcttttccttccccaagcaccaagattttgatgtgaacatctttttttttttgttttttttttttgagatgaagtcttgctctgtcacccatgctggagtgcagtggtgtgatctctgctcactgcagcctccgcctcctgggctcaagcgatacttgtgcctcagcctcccgagtagccgggactacaggtgcccaccacgcccggctaatttttgtatttttagtagagatggggttttacagcgttggccaggctggtcttgaactcctgacctcaagtgatccacccatctcagcctcccgaagtggcaggattacaggcgtgagccactgtgcctagcatgatgtgaacatttctacctgtagtgttttttggagagctgttaatattttcatacttgtaaaaatgggcatatttatgtaaaggaagataaaagaagtaaaataccatctgagtggcttgtgggcctgaagtcagttctggcttctagaaaccatctgttttcatttttagggtgttacgtagttaatgccttggcttagcagtggttacttggaaataaagatgtgtcctgctgtgttgacaggcccttcatgaggcagcacacatgtcattcttgctactgtgtacctagctgctgaaatgaatcctataaattatatgaaactaaaaagattttctgatcttatagagttgaagtattgataacaccaaggaactctatcacaatttgaaaagataagcaaaagtttgatttccagacactacagaagaagtaaaaatggtaagtttgtttttgatcacagatactgtttcttcactcatgtacagagatgtttgtagccttttccaaagcatttgcttccattaccatttttattagcccttttggattataaagcaatattatctattctgtattccattctgatagtgtaggaacgaagtcagtgccccattactcccactgcccagagacaacagcttttcagtttgcttgtccctccttggttcttcagttgtgctcctgcaggctttgcttttacacacgagcgatatagcatcattctgaattgtgcagcttaaaagatgaacgttgggctgcttgctctctttacatcatttttaacttaattctcacatccctagcgtccaatgcgaatttttgtgaatgatgaccgccatgtgatggcaaagcattcttccgtttatccaacacaagaggagctggaggcagtccagaacatggtgtcccacacggagcgggcgctcaaagctgtgtccgactggatagacgagcaggaaaagggtagcagcgagcaggcagagtccgataacatggatgtgcccccagaggacgacagtaaagaaggggctgggtaagtgaggttttccgttgtccttttcttttttgtagggtagccagggtagaggttggcacctgttttctaagaaactccagcctctctggggacctctgggttgtggtcagactgaattcctcactgagctgggtgttggtctgtccctcagggaacagaagacggagcacatgaccagaaccctgcggggagtgatgcgggtgggcctggtggcaaagggcctcctactcaagggggacttggatctggagctggtgctgctgtgtaaggagaagcccacaaccgccctcctggacaaggtggccgacaacctggccatccagcttgctgtaagtgtggccaccactgccgggtaggtgggtgggggggtggtaggcatgctgattgaggatgtggggcccaggaagaagtgtcctgctaggctgtgctccaagaagcacatgccacacttgccctggcacttgctgtgcgtgtgccttctcagtaggtgacaaccaggacaccaccaagccacagagattctgtggaacctgactgcaggggtcataaggaccccgtgcctattgtgtgccaggctgcaccagcccgaggtcattgggcataaacttcacgtctaggctccattggatggatggctagatagatagcagagttgttatctcttccattggatccaaagctgaatgtaaagaattttttttttcttttgggacggagtctcgctctgttgcccaggcctagagtgcagtggctcgatctcagctcactgcaacctctgcctctgaggtagacaattttcctacctcagactcccaagtagctaggattacaggcatgcaccactacacccagctaatttttatatttttagtatagacagggtttcactatgttggtcaggctgtcctcttaactcctgacctcaggtgattcatccacctcagcctcccaaagtgctgggatcacaggcatgagccacctcgcccagctgaaaatcttttctatatgtttattttttattttataaatagagatgggttcttgctatattgccctggctggattcaaactcttgccctcaagcagtcctcctgtccccagcctcccacagtgctgggattagaagtgtgagccaccacaaacaatttttttttttttttttttttttgagatggagtcttactctgttgcccaggctggagtgcagtggtgcagtctcggctcactgcaacctctgcctcctgagttcaagcgattctcctgccttagcctcccgagtagctggtattacaggcacatgccactacgtccagctaatttttgtatttttagtagagatggggtttcgccacgttggccagagtggtcttgaactcatgacctcaaatgacccgcccacctcggcctcccaaagtgctgggattacaagcatgagccaccacgcctggccgtttttatttttttaagatgaggaaggtttcgctctgtagcccaggctggagtgtggttgcgcaattatggttcactgcaacctccacttccagggctcaggtgatcctcccattgcagccccctgagtagctaggactacagtcatgtactaccaccccgagctaaaagatcttttaaaaaaaaaaaaaacatttatttgtttcattgtgaaagtattgcgtaaataatggcttctgtttattgagtgtttgctaaagtcaggccctcagccagatgtgctcttcatgtgtgttatttcatcctcctctaagtgggacagatgatgtgacagagctgcagggcagctgaggagtggatcccaagacccacggctgggctgtttggaggcatcagaacctctgccagctgttgcctcctcaggacacagtccccctgaatttatttataggataagcaaaaaagaagtgtacaatcatctataaatctttgacagagtcttgctctgtcatccaggctggagtgcagtggcctgatctggggtcactgcaacctctgcctccctggctcaagtgtttctcccacctcagcttcccaagtagctgggactacaggtgtgtgctaccacacccagctattttttgtattgtctgtgtgtatgtgtgtgtgtagatacgaggttttcccatgttgcctaggcagttcttgaactcttgatgacaggcctgagccaccacagcctttgaatctttgaatcttattccttggaaagaaaaacctgatttactttcacaatgcagatttgtgttctttcacatgggactgacgattttgggttcaggacaaagatcaggattaaaatacggagctaatgtaaatgcattagatacttctgcggagctattgtagatgaagctgtgaaatttttctagtgacaattttctttttttttctcctgaaggtacatcagcatagaggtaattccttttcttttttgaaacagtcttgctctgtcacccaggctggagtgctgtggtgcgatgttggcttactgcagcctccgcctcctgggttcaagtgaatctcctgcttcagcctcctgagtagctgggattatgggtgcccgctgccatgtccagctaatttttgcatttttagtagagaccatgttggccaggctggtctcgaactcctgacctcaggtattatgcccgtctctgcctcccaatagttctgggattacaggcgtgagccactgtgtccggcccatagtggtaattttttggcagaggggggtgtgggggcgggacagagtttcgctgttgttgcccaggctggagtgcagtggggcgatctcagctcactgcaacccccgcctcccgggttcaagcgattctcctgcctcagcctcctgagtagctgggattggaggcatgccccaccacgcccagctactttcatgtttttagtagagatgggttttctccatgttggtcaggctggtctcgaactcccgacctcaggtggtctgcccgtcttggcctcccaaagtgctgggattacaggcgtgaaccactgcgcccgtccatagtagtaattcttaaattaactttattcttgtctctatctagcaaggatattaagtgaagtaaattgtcataaatgtttctacagtaaaaacatttgtgagaaaccattccttttttttttttttttttttttggaggtggagtctcgctgtgtcgcccaggctggagtgcagtggcgccatcttggttcactgcaagctccgcctcctgggttcacaccattctcctgcctcagcctcccgagtagctgggactacaggcacctgccaccacgcccagctaattttttgtatttttcgtagcatctctggtctttaccaggtgaagtttcatctgtgttagccaagatggtctcgatctcctgacctttttttttttttttttttttttttttaagggaggcaaggtctcttgctctgttgcccaggcttgggtacagtggtgcaatcacagctcactgcagcctcaagcaatcctcccacctcagcctcctgagtatctgggaccgcaagcatgtgccaccatgtctggctaatttttaaaattttttgtacatacgaggtttcattatgttgtcctggctggttttgagctcctggccttaagctatttgcttgcctcagcctcccaaagtgctgggattacaggcatgtgccattgagcctggccaataattattccttaaagatgaaaataataggtatttttaaaatcattttcagtggttccttaagaggggtgaatcactctcctcccctgataacatttggtagtgtctgttgacaatgcggtgttggggtgctgtggtgctgtcagcacctgataggtgaagaccagagatgaacaccctatcatgtgcagagtagtccccccaaccaagaattatccagcccagaaggtcagttgtactgaggttgagaaatcctgtttcagatttttcaatgtatttattctcctcccaacatatttacttaacttccttcagcttgaattttcttctttctttgttttgttttttttttttttttttttttgagactgtgtcttgctctgtcccccaggctggagtgcagtggcacagtctcagctcactgtagcctccgcctccccgcctcagcctcccaagtagctgggattacagggcctgccaccgtgccgggctattttttatatttttagtaaagacaggatttcacaatattggtcaggctggtctcgaactcctgacctcaagtgacccacccacctcggcctctcaaagtgctgggattacaggtgcgagccactaccctcagccaaaagcttgaattttctttgtcaagtcataagaaggtggtatcaagaatgaaaatagtcgtgagtgtccttgtagatgtgcatttgcagcaagtacatacgtttagatgcaccataggatactgcacactgactgtttcactgcacacagggtttattctacactggctgctcatcccagcatggaagtagcagtggctggatgcccactctgcagtgtccaccgctttccccgcagcgtctgtttgaggcttccagcagccttgtggtgtagttcgtgtcattaagtccattatacagattagagtctgtatgagagtgatttatccaaagttgatcaactactaaagggcaaaaggggggtctcctcctcctggctcctggatccgaaactctttgccattggtttttttttggagactgagtctcactcttgtcacccaggctggaatgtagtggcgcgatctcagctcactgcagcatctgcctccctggtttaagcgagtctcctccttcagtcttctgagtatctgggactacacgcttccactgcacccagctaatttttgtatttttagtagggatggggtttcaccatgttggccaggttgatcttgaactcctgacctgacctcagctgatctgcccactcagcctcccaaagtgctgggattacaggcgtgagccacctcacctggcctaacattgcttttttgtttgtttgtttttttttttttttttttttttttttggtttttttttttttgagacagagtctcgctctgttgcccaggctggagtgcagtggcatgatcttgcctcactgcaagctctgccttccgggttcacgccattctcctgcctcagcctcctgagtagctgggactacaggcacccgccaccacgcccagctagtttttttgtatttttagtagagatgggatttcaccctgttagccaggatggtctcgatctcctgaccttgtgatccgcccacctcagcctcctaaagtgctgggattacaggcgtgagccactgcacctggcctaacattgcttttttgtttgtttgttgttttgtttttgtttttgtttttgagatagagtctcgctctgtcgcccaggctggagtgcagtggtgtgatctcagctcactgcaagctccgcctcccgtgttcacgccattctcctgcctcagcctcccgagtagctgggactacaggtgcctgctaccacgcccggctagttttttgtatttttagtagagatggtgtttcaccgggttatccaggatggtctcgatctcctgacctcgtgatccactcacctcggactcccaaagtgctgggattgcaggcatgagccacggctcccagccctaccattgcatttttaagcaccgtttggaaatcgcttctttcactagttatccctctttcaagtacccaaaacgtggccaaagacctggccaattagagagaccctgacatcccaggtgaaatcacttccgggtcatcatactcaagacgttggcctttctgttgcaggaataggtggagccagataaaattgttgattgctttgaggagaaagtgttttgaaagttgcattttattttttaggctgtaacagaagacaagtacgaaatactgcaatctgtcgacgatgctgcgattgtgataaaaaacacaaaagagcctccattgtccctgaccatccacctgacatcccctgttgtcagagaagaaatggagaaagtattagctggaggtagggaggccgagacacgccggcaggactttgaaaatgtggtgttccctcactattcaaatgtgctattcagttttagactgctttggtatacggtgtagattgaccacctttactctgagatcacatctcccgttggctttgagtacttgggagtttgacaaaacagtcgcactaaaagtgagtagcacttttcataggggactgcaccattttcctttatcttcatccttgaacgttctcaaacatgaatgtggaagttgcttttctatggagccattctctggctgtggagaagtgtccctggtgattccatggttttaaagatgagacaaccagatggtttctgcatgagcaccacgttggagtttaccaacagcctgtgctgcagctgagctgagggcctcttcgtttgtcctctgtcatggctcttttatcatttaaagtgacagaagcacaaagagctgatacagagttttggataaagttttaaactgttgtccaatttttcaaaccacatcattggacctcacgctaataatgtgctcgcagtccatggcccgccgctcgcatgcctgtcttcaggccttatccaaacccctggtgtgcagatggcagagaagataaacgctctgcttggccgcagcataggctggcatagcgcccttgttgctgtttacctttggttctcatagctgattccgactaccaaagcccttctagttgatcaacgtagggacgctggacctttgaccaacaggactctctctgtcaagggctggggctagggcagtcccgcctggtgggcggagttggtcccctttgctgcagatgccttgggatggctgttgtgtgatgcagagagggagttcatttcctctccctcggcctttttaaattttttcctattgaacattttagcatagctaatttattgggagaacatggggaggaggcaagggaagaggattagaagataggctccacctatctctcccctccctcatgagattattccttttagaataactccccacttttgtttttatgtttgttttattttttctttttctttcttttttctttttctttttatttttggagggggcctccaatttttacaatttcctcacagggcagagttgaatgtgctctagtttctccttccctggtccagggtggagatgaattcagcttctgggaaactcagctgccctttagaaagctgccacatcccctttccacctgacagaaaccccttggtcaaactgtgccttgtcttcttattccatccatgaatagaaacgctatcagtcaacgaccccccggacgttctggacaggcagaaatgccttgctgccttggcgtccctccgacacgccaagtggttccaggtttgcattttgttcttctatttgtcttttggtagagaattcctaagttttaacttggctaactgtcaccataaagattccttaacattgacgatagccgtgccgagcttagcacctgcagctgcgcaggtcctaaaggagtgcacctcaacaaattcgaccccaaaagaggctgagactgagttggtgggctgctgctgctgctgctgctttgtgttaagagtaacactctcttgtacacgtagtgacattgcggctggccacagccttggtggtcgccagtgttgactgtttacccttggcaaagcagcaacctgacacttgtgtcgttcatgttgacttgtgccctgggcggtgcctcagactgaagagcctgtgttttgttcccctaggccagagccaacgggctgaagtcttgtgtcattgtgatccgggtcttgagggacctgtgcactcgcgtgcccacctggggtcccctccgaggctgggtaaggcatgttgctgtggctactgggggtggtgtgtgcagagtcttttggatatcccaggaacacttgatggtcacggggcaggagtggcctcttgacgcgtggctggtgtgtactctccagagctgcctgtggagctgctcctgcttgccacacctggggttggggttggggcagtgtgggtcggggccctctgcagggtcgcacagctcaatcccaggagtgggggctgaccaggaggtgggaatgatccctctgggaaggtttgtagatagtctcacgcaggaccagtttttggcagttgcacccttttttttttcagcttgcagttgaggtggtttttatatttgtaaataaatggttagattttaagtaagaagtactacatcataaccttagcttggtctctgagctcacacagcctgctaggatgtcatgtctggtccttgaaggcccctgtcctagatgccctggctcaggcttagccctgaggctttgactttacccgactggttggctatgagtcccacgtgtgccccgacccactcatgcagtgacagctccccagtggcggccggccccatcctgtaggctcttggctcactgtccctcttccctttcagcctctcgagctcctgtgtgagaaatccattggcacggccaacagaccgatgggtgctggcgaggccctgcggagagtgctggagtgcctggcgtcgggcatcgtgatgccaggttggggccttgtgctttgcaggttgcagggaaaggacagggttccaggccgcctcctggcgggtacactgactgggttaggacagcagcagccccgtgtccaccccctagagctgaagcatgtgactaccctctggcaccatcatatccagccctgaccgggtccgcagccgtcattcagagggcggatccggggcagtggtgacccactcccacgtgactttcttgctctgagacacttgtgaattatttctgtcaagggctggacgccgagtgggtcaccgagctaggcatgttttccagagctgggtgtggatggggcgcggggggtaacacacctagttccctcagccagcacacctcttcagagatgctaaaagataatcctctgcatatcttccttgtttcctgccttcagatggttctggcatttatgacccttgtgaaaaagaagccactgatgctattgggcatctagacagacagcaacgggaagatatcacacagagtgcgcaggtatagtcatcgccattgccaacgtgcgccctgacccagtctgtaatcactggcttccagttccattactgggtattcccagggtagcccctggactcgtaggctcaggtcggggactgaaggcaaaaggattgtgtctgatacagggcgccccaatctgggctgcttctttcccctggtgccatgcgtggttttcatctgccccctcccttggcttgctcgagtgccgttttcagacactgtgagtggtgctgggagatgtgtttgctgtgcggactgctccggggggaccttcccctgcaggcccccacatggctccgtgtggcaaccagtccccaggttggggtctcctgtattcctttggaaggggggtggtcacaggctggccttcccccacagcaaggctgggcttgagcagtcaggctctcccctggctggtgggggaccccttgctgtcgtaagggagaccattagcagcccttcagctctgcccctcctcagaaggcagtagtgagcacacactccatggccgggagcacagggcagctgagtcagagcctcttccccttctccagcacgcactgcggctcgctgccttcggccagctccataaagtcctaggcatggaccctctgccttccaagatgcccaagaaaccaaagaatgaaaacccagtggactacaccggtaagcctgcggcggttgcctgatggctggggctccaggaagagtcaccatctgcatctcccagccatgccctggtctctccttgcagttcagatcccaccaagcaccacctatgccattacgcccatgaaacgcccaatggaggaggacggggaggagaagtcgcccagcaaaaagaagaagaagattcagaagaaaggtacaggccgggcgcggtggctcacgcctgtaatcccagcactttgggaggccgaggcgggagaatcgcttgagctcaggagttttgagaccatcagcctgggcaacatggcgaaaccccgtctctacaaaaaatacaaaaattagctgggtgtggtggcgcacctgtagtgccagctacttgggaggctgagatgggaggatggcttgagcctgggaggcggaggttgcagtgagcaactgtactccagcctgggcaacagagcgagaccttgcttaaaatcagtgttgaaaaattttagaagctaaataggtaaaaaagcaggaaggtgcagacctccactagtgctgctgctttatccatctggtcctgtgaaggctcaccctgaagctatgggatggctgcttttgtttcatttttctcacttgtgatttctgagtccttttaacaatgatgaggcatgattggggatgtggaagatgagtaggatggtggtgctacagctggaggccacaggagaggtgcaagctgggctcagtttgtgtggctgccccacccactgtgttacgccacagaggcagccctgggggttaggattggcagagctctcgtggagacctgccatcgtgctgatccagagccaccttgctattctctctgtagaggagaaggcagagcccccccaggctatgaatgccctgatgcggttgaaccagctgaagccagggctgcagtacaagctggtgtcccagactgggcccgtccatgcccccatctttaccatgtctgtggaggttgatggcaattcattcgaggcctctgggccctccaaaaagacggccaagctgcacgtggccgttaaggtgagtgtggccagcatcactgtcttctaatagcagaaccatggtctttgttttgggccccttctgagccattgtctctcagggagggcatgtagattctaaaaatacacatggttagatggcgagtatttgccaagtcacgtggcaagaacgccttcccactgtggctggcaggcagaggggtccccaaacatgattggggcattagggcctcctgggagcaggagctgaaaggaaacagccctcctccagatggcttcccgggtgggtgcctgtaggccatgaggaggccctgcatgcagccctgcttcactgggaccttgggggtcttgccacctctgcaggtgttacaggacatgggcttgccgacgggtgctgaaggcagggactcgagcaagggggaggactcggctgaggagaccgaggcgaagccagcagtggtggcccctgccccagtggtagaagctgtctccacccctagtgcggcctttccctcagatgccactgccgaggtgagcacatggtgggcgctgggagtgactgcctggacagagcaggcagccatgtgtcctgtcagtgaggtggttactggtccttgttaatttgccccaaaaagtggacctttcaggccagaagtccgcacaggaagctgggtgctgccctccgagccgtgtcggggagggccttgtggatgttgtcccagcatcctataggctacactggggtggccttgggttgataacgtgctgttcagaggggaggcacaggaagggggcacattgctggaaggccctcactagagtcagtggagactctggcaagggctggcagtgtatgaagagcagaggccctgcctcagtcctgccactcctcccatgtgactggaatgcccatagctgagtttgtcggtcttcttttctgttttccctgagaacgtaaaacagcaggggccgatcctgacaaagcacggcaagaacccagtcatggagctgaacgagaagaggcgtgggctcaagtacgagctcatctccgagaccgggggcagccacgacaagcgcttcgtcatggaggtgcgcagcctgaagctgcctgctggggcagtcccatggggaggcctggggtccccctgcccctggagggaggcactgagtcatctccatctgcactttccaggtcgaagtggatggacagaagttccaaggtgctggttccaacaaaaaggtggcgaaggcctacgctgctcttgctgccctagaaaagcttttccctgacacccctctcgcccttgatgccaacaaaaagaagagagccccagtacccgtcagagggggaccgaaatttgctgctaaggtgagcagtggcccttgaacctccttgcccaggcatgggttcttctgcaatgtgagcacgaagggaatgtcacttccctgtgttctcttctagccacataaccctggcttcggcatgggaggccccatgcacaacgaagtgcccccaccccccaaccttcgagggcggggaagaggcgggagcatccggggacgagggcgcgggcgaggatttggtggcgccaaccatggaggctacatgaatgccggtaagggccctcatactgcactgtccccgccttccccacgtgcatgctctgggaacaaatgtgtggggctcctggggtgggccggagacactgctggaccccggtaaccctgtctttccctttccaggtgctgggtatggaagctatgggtacggaggcaactcggcgacagcaggctacagtaagtgtgcgtttctgtctgtctgacctgggaagcagctgcagtgtagcgtctgggcctgagttagcaaagggtggccagagcagcctcgaggaggctgtagaaggggcacacacctttttgcggtgattaggtcagacggccctcgacccccaccccttcccggccccacagtgggattgattgtgttaatacacgaactcgtgtaactgcaaagttccttaaaagttagaattttaaatttctctgctttaagccatgcgaagcaccaatcttgtgaatacgcttttccggccagtgcacagctcttgtcttgagaaggagccttcattggggggttacaggagcagagaaatctaaaacatgaatttcaaatgtggcgctctgtgccctttttcaaaagaattctaatttcttctctctgctctgtctcccccttttgtaggtgactttttcacagactgctacggctatcatgattttgggtcttcctagagcgtctaaaagtattgcacacaaaatcaactttttactccaatttcctccaactccaaaacccaaagtgtccgtgctgtgtccctgtgcttcactgggtttctcaaccgtggcttttcaccgcagcttgtctgaaactcttagcctgcagaatttaagacaatggcagtttttatcgtgatttgcctttgaacttggtcctattgaagttcacaataagtggaaaacaattttttcagagaatgtatttttgtgcagaattgcacagaattctagagacagcgttgttcggcatcaaggcaaaagcccacctttgctttttatggaaagcattactttatttaaagagacagacaatgacgcattttaatctacctttgtcttaatttacagcaggttttgtatgaatttttaaccttttaacaaactcccaaatctggttgatgcctttgacagtgatgaaaacgatttcaccacatctgaatccagagaaaccggctttttttcttattgcgagcatgttaaaacgttgggaacatgtggggaattgtatattgcgctgaattaacttctcccgcctcttgtaatgctctggtgggttcttgtttgggaatgcgatattttgtggctggtttagctagagagtgaactctcaaaggtatcaaaactgtgcttccattattagtgcaagaaacagacaggctttaaggggtagatgacgtgaaattttgcaagtcttaattacagctgcagatgcatgggattctggatttttttgttgctttttagtttaatgggactttaaaagtaattgaggagaaagaaccgtgatgttccctgtttctccagtaaaggactggcttttgcttgggcagaggtggtgctgctgggtgtgcagctgccacagactccaaaggcgtagaagtttgtgccaacacacggagtcattctggctctctgctgaggcccctgttttctggcaggtgccctccttggaaactggttttggctctgatcagcggttctttttgcagcaaagcctgcatctgtgttgacttgcaagattttgcgtttattcaggcaaaaactggtcaaaatggttactacatgatttgttcccagaggtttgaaacattcagtgaaactttttaaaactttgattgcatgatgtattttttttttagaaagttattgtttgagaataatgtctttttataccaggaaaatagttatcctgaatgacgttgaaaactccccctcccctttatttttttttaatcaatacatgtgaaagtaacaagccctcggcccttgcgtcttcattcattcccggcttcaggcggggcgaggtggtgtgctcagtgcaggacactggggaagctggggctgtggggctgtggggtgtgggtcctggtgggggggttctgaagatcccatcctcccagtctcctcgctgagctgccgcatgttcgctttctggcattgtgggacacatcctcccccttggtgtcttggctttgtgatggcgggcgagggaggaggcctgcctgaagaacacaaactgaaggttgcagatagttctgtccacgttgtcatgcaggcagcccaccacaccagcgtggggtacacatctccagtgggtggaggcacgtgaggactcccagttaccctacccaggaggcggtgggcccttagtgtcctcaatctgggaaggaaggacaggcagcgtgggagcctccccttccctcccacccaccctgggcctggaggtctgggcagcctgactgggcaaaggtggctgcattcacaagccgacccgctctgagagcccaggaactcagctgcgcctggtgagcgcttgggcgttggccagcttggctggagagccaccaccatgacccagcctcccacctcacccaccctctgagccttcccacacccactgtggaggctccctgtgtggggctcccttgcaaggcttggggtgcagcattccctcagccagtgccgtcccctttgttccactcgagcctctggcggggccgtgtattgacaaacctagtgaccagaagtggggtctcactgctacattttcagcttgcggctgagaatgtagtggctgcactgcacactttcagccctgctgctcagccccacctgcacccagcagctgtgctggggacaaggaaggggcctcgggagtcattagggctgtaggtctaggcctcacccggctttcctgccccagccgtggccactgccctctgccagccaggctggggcttggtcacatcctgagtcacatgcttgcatgagtatcgcaagggaggtgcctgcatcattgactgagtctcgatttgtcttccaagaaccaaaccagctcagaccagttggtcttctcaggatgatgacggtccggggcctctttaaatagcatcttttaggggcctccaggcctgtgcctgtggagcctgttcccagcacagcagggaggaggggggtggctgctgcttctctggggctttgcttttcctgtcaccattggggatctctgggtagccgtcagctagctgtgaatgtcgtcccgcgctcggagtccatctcattgtaatgttgacatccgctgcaaaagctgctggcgcgtgctgcttggcaaagccccattgttgtcatcagctgctgggtgagtggagctgaaggctgggccagcccaaacggctgtgctaaggaccggagccactgctcctctccctccttgtcctactgcctctgacccgggcttgtgggtcagccttcaggacccatggctgccgcctgcccttccctcccttccccctgccctttcccgtcctccgcctgacccactgcctccctgtttaggtcagttctacagcaacggagggcattctgggaatgccagtggcggtggcggcgggggcggtggtggctcctccggctatggctcctactaccaaggtgacaactacaactcaccggtgcccccaaaacacgctgggaagaagcagccgcacgggggccagcagaagccctcctacggctcgggctaccagtcccaccagggccagcagcagtcctacaaccagagcccctacagcaactatggccctccacagggcaagcagaaaggctataaccatggacaaggcagctactcctactcgaactcctacaactctcccgggggcgggggcggatccgactacaactacgagagcaaattcagtgagttggcttccagagcccctcggccgggccagggtccaggccccagcagtgcagcccacggagtggcagaagctcggcactgcccagacctctggctgagggccttaggaggaggacaagtggtgctggctgcgggcgggtgctaggaagatggggcgtgggacctcatggtgccgtctccgccactctctctggtgtgttctccgaaggcagggtagctgaggcctctgtcccgaggccctggctgtgggtgaggctgcaaggtgacttcctgggacttgctctagagagttttgcatccagcccctgcaagagcctgacctctccgccaccgcctttccgcttcctcatgcgcagacccagcaggcccgggctgcaccagtgacccagtggggctgagtaggtgtgtccttgggacccagcagctgtcagcagcaggccagggacttgacagaggctgtgctggtgggtcagaagggggtgctgtgtgtctggtgctgctggctgaggagaggcggctgctggggtctcaagcacttcctcagctgctgctgggaagtttgggctgcaggaacagatgggaaggcaccccagagcagggctttggagcttggtgaccagcccagcccagggccaggtgaccctgcagggctccagctggcccctggtacttacctgatgggctgatgtgcgacattgaagcaggcagggagaagagttagaggcccagggtctgggccaggggccggccgcgtctgaggcgcaccacaaggcccccgggccgcccaaggtgtgtctttcctggggccccttaaccatcctgtcttctctcccccagactacagtggtagtggaggccgaagcggcgggaacagctacggctcaggcggggcatcctacaacccagggtcacacgggggctacggcggaggttctgggggcggctcctcataccaaggcaaacaaggtgggcctggagcccctggtggcacagcatggggggcctggcagctgctgtgaagcgggatatggacctggtgggagcagacagcagcgtgggcagggctgcagtggcaggtgggccctgtgagaacacgcactcggatgcactggcagctgctaaggctttcgggagcagccggagagccagcagtgtccccacgcttaacccctggtacctgtgtgaaatgtgggtgacaccaaggccaaacagctgttcccccggttctggccagtagctcagccttgggctcaggtagcttctcccagaaacgagggtcacagtggtcccacctctcagagtcttggtgccagcctgatccagtgatgtgtggtaggcaggcagagccgcacaggagcccataagtcttgcccacctgcatcctggccgaggcttgggtgtgggctgcctaacctgagccccgctggctgggcccctcggctctaatccaccactctctctcctaggaggctactcacagtcgaactacaactccccggggtccggccagaactacagtggccctcccagctcctaccagtcctcacaaggcggctatggcagaaacgcagaccacagcatgaactaccagtacagataagcccccgcggggcggagatttctaccttctgcacttactccccatcagaagatcgagttttatgcatcacagttaacatgtcagctggccctccaggcccccgcccccatcccgtccacgttgctgtgtcgtgaggtgcagcgggtcaccctgtggcccgtcctgtgacccatatttagccgtgtttgggactccgtgtcttcaatggtttgttagttgccattacaactttgtctgggtagagtttttgagtttttgcagttcagtatccctctgtctattcacacttcgtgttagtggtaactcagtttgtctttaaatagttacagaagggatacgtcatttgttaatgcttttgtgaagtgagttaaacgagctttctgtattttaatgctttagtgtttcagttttataagtgaagattttattttaaaaaccagtgggaaagagtggggggtttctttttatgtctgggtcattcaggcagtacatctgaattaagctgaatgtagacaaataaagaaaaacaaaactgcgcccgtcttaggcctgggtgtctgacccaccagcagtgcaatgggcaggtttccccactctattcctgctcttgggaaagcagcgtgggccatcaggatggtccctggtccttagagagggtccagttcaggcttctagacattttactcatgctcagcgaaggctggttcctggtcccctgggctgtgtagacccggtgtcccaccaggctccaggctcccaccatctacagaggggcttacagcgcccattctggtcttggggaacccatcacaaaataggctttttctgctccccgattctggtgtagttctaagtacacagtgatgtcctctgtaggggcgtgcctgtggtggaacataacgcagttacaaaagaaagggcaggtgaggcctgggtaaccccagccatggaccgtcagtggctggagggagcttcgtgtctgtgctggagctgcagcctgctcgccatctggaggctcagtggagtggggagttggggttctcataccagcagatttccctagagcgtgattctcccatctgaggcaatcttgcctcccaggggaaattttgcaatgtttggaggatgttgtcacagctagtagcgggtgctctgggatctggtggatagatgccaaggatgctgtcaagcatactgtactgcccagaacagtggcccatagcagggacctgccctatcaaaatatcaggtgtatggaggtggagtcccaacgctagagcagcccttctcagctccaccctgcccggggagggaggaggagctctggtttcagagcagtgccgggattgcctttccccaggatctgtgtcggccatccaggaagaactgtactggccaagcctgggaccacacgtctgcagagatcctgctctgctggcctgagccccaggccttggcctcctgtgcttgggtaaccatggccactgggaaaagcaaggaccgtgtttgactttcttggagaggtgaaagaggtgaaagaacaagttgtgtgctagaaaacttttgaggaattcttatttgtgttagagcagaggaggtcccagataccaagtggcgcctcccaggaaaggctgggagaagaggtggcctggagtaccccgagatcccagcagcgcacacagtggagggatgaggatggatgggtcctaacccctgattttgatgggatgtgttcatgtcctatctcctctcctggacacattaaggggttgggacaagaagagactcctgtgagatcagcagacctcgtgtttaaggagagaatgcctgcctgcaacactcatggagagggacacttcctggccccacctgctaaatacctccaaactctgggcaggcgcctgcattctcaacacaggacttcccttaacagtttccggatcagtgaccaccaccacgttcaggtttctgaatgcagacccaccacgagggatggattccacccgcccgccctgctgcagatacatgcggcacagcaggcacgtgcctggagagaacagctcctgagcacagcacccttggagccctcaccccgctcacgatcctcaccagtgctgatgatgccgtcatgctgctggcctgagacagtatcccagctacaacaggacgacaccgggttcaggaatatgtggctatcaccttgagcactgacagtggccttccaggctagttgccttccaaacgcaggtagccgacctgcaggagggcctacaaacgggcccagcaagagctgggcaacagctggcttgtgaaatgagacaccttgaccaatatgctttgggtggacggtctcctacatgttcagtggaggccaccaggagcatccatgagcggggaaggggtccacacccttacatggcaagttgatacgatggggtgcttggtggatgggccatggaggtccgtgagctggaactgggcacacgccatcccagagggctcaggatgccccaggaaggaaagaagggcaacagactacacgattggacgtgtgtggttgactgggatgaagttggagggaggggcagggccttgcaggggattggtactgatcccagggaggaagtgttggggcttcatgaactaggatgaaaggaggcccctgagccatgacaaggggcacatccaggatttccgccaccctgaatttagtagagctagtaggccctggtcgtcactctgggcagggatgccgtcagccttgagggtcgccacccacctgtgtgttgccctctgtcctggcagggaaacatacaccccttgtctcaccaccaaccttgcttgtgtagtcagcagggctggccctgccccaaggactcactgcatgtacccggacccctaggcctggcctttgcagcatagttgggagcttctggattccatctgcacctgtgagccccatgctggctgtgcactgcgcgggcctgagactgctggatacaatgttgggcaacaactcagccagcctgatggcagcctcagaggcttactctaacccatcccagaataaatggagacttcatgtgttcattgtttcattcactcaacatgcgttcgttcattttttaagagagacaggatattgctctgtcatccaagctgaagtgcagtggtatcatcgtagctcactgcagtcttgaacccgagagctcaagcgatcctcccgtcacagcctctggagtagctgggaccacagggctgtgcctccatgactgactaattttcttgtagaggtgggtcgccaagcctagtcttgaactcctggccttaagcaactcagcttccctatagtagctgggatgacaggcagcgccactgtgccctgctgtcgtgtttattattgcacagtgattacatgtcaagtctggtgctggttgctgggaacgaaatggtgaacctgctcccaacccacatgtagcttccaggcacaaagagggctgtgtcacagtgggacaggaagtgcctgtcaaggctttcccctcaggtgagaggatgggtgagttggacccaagagtgttaggaagggaaggggaggccaggcagagggaatagcttgagcaaaaattcagctgggggatgaggatgggcttcaagaagctgaagtcaggtgggtagagcattttgatgcaaaacaaaggaatgctgggaaatgaggctggaggtcagtgggatcttgagggcccccaagtggagtgccaggcacaggagttcttgccttctttctaaggacagtggggagccatggatggattctgacctgggaagacttcaggcccattcaggctcccaagagtatatatttgtttatttattttacttatttagagatggagtttcgctcctgttgcctaggctggagtgcaatggcacgatctctgctaaccacaacctccgtctcccgggttcaagcgagtctcctgcctcagcctcctcagtagctggaattacaggcatgtgccaccaagcctggctaattttgtatttttggtagagacaagttttctccatgttaggctggtctcgaactcccggcctcaggtgatccatctgcctcggcctcccagtgctgggatgacaggtgtgagccaccgcacctggctgtttattttttaagatggagtcttgctctgtcgccaggctggagtgcagtggagcaatctcggcgcactgcaacctccgcttcccaggttcaagcaattctcctgcctcagcctcccgagaagcggtaactacaggtgtgtgacaccatgcccagctaacttttgtttgagacagagtcttgccctatcacccaggctagagtgcagtggcatgatctccgcttactgcaacctccgctttctgggttcaagtgattgtcctgactcaacctccctagtagctgggattacaggtatgcaccaccatgtccggctttttttttttttgagacggagtctcactgtcgcccagactggagtgcagtggcatgataccgctcactgcaagctccgtctcccgggttcacgccattctcctgcctcagccttccgattagctgggactacaggtgcctgtcaccacgtccggctaattgtatttttagtagagacggggtttcacgtgttagccaggatggtctcgatctcctgacctcatgatccgcctgcctcggcctcccaaagtgctgggattgcaggagtgagccaccgcgcccagccaattttttgtatttttagtatttagtatttttagtatttagtatttagtatttttgtattttagttccaccttgctggccaggctggtctcaaactcttgacctcgtgatccactcgtcttggcctcccaaagtgctggtattacaggcgtgagccacacggcgcctggcctacagtttttttgtttgttttgttttgtttttgagatagtctctcgctctgttgcccaggctggagtgcactggagtgatctcggcccactgcaacctccgcatcccgggttcaagttactctcctgcctcatcctcccgagtagctgagattacaggtgcccagcattatgcctggctaatttttggatttttagtagagatggggtttcaccatgttggccaggctggtcttgaactcttgaccttgtgattcgcctgcctcagcctcccaaattgttgggattgcaggcgtgagccaccgctcccagctgaaactattttttagacagggtctcggtctggtatgcagtggtgccatcatggctcactcatcctcctgagtatctaggactacaggcctcactgcctggctaatgtttgtttttcttcataggggcagggtctcaggttgatgtccaattcttggcctcaagccatcccctcttcagcctcacgaactgttggaattaaccattgtgagccaccgcgcctcagtacagttcttttggttgctgagctgagtaggtgtatgggagaggtgagaatgggggccctggagacgacaagaggcttgacttttggaacatcggagctgaggtttacagtgatttttgcagctgagtccactggtcttgataagggaagagtttctagactcaagagggttaaaaacggtatgtcaaagaaaaggggcccgtccttctcattctcagggagaccagcattctctccacggagtagccaagaagtccatgaactcccaggtcttgggccagtgcttttgtcttctcaaaagatctggcgcctaaggtcttcttgcttggcaacagggcagtaggtgggtggcaatgtcacagagggacggtccccacacgtccgatgaataaactggagaaatcctccaggctatcgagacgaccacccgaactcagggctccaaggaccattatttcagcaaaacccctaactctcctctcctgaatgttctgtattcctcagtcagtgctcagaagtccgtatcctggacccaggacctcagcacccgctccctaaggccaaccatatagtcccctgtttgggggctcccctgagcagtcgcgggcgatcccagagaaggcaagtttcgggatctgacagccccagtcacgaccctgggtgctgcgcaagcctccatgtgaagagcgcggaaaccgccccaggcctagctgctgcaaaccaccgcttccaaacttcccgccggtctctaggctccgggtgcccaccgccccttccttccttcctttgcgcaatcaacaagctccaactccagatgggatttcgcaggccctgccctgtgtataaactctcttcgtcctggggttgtcaacaaaatttttttttggagacggagtctcgctgtcgcccaggctggagtgcagtggcgcgatctccgctcactcactgcaacctctgattccctggttcaaacaattctcccgccttagcctcctgagtagctgggattacaggcaagcgccaccacgcccggcaacaaactcttctaattggccggactcgcaggccccgcccccacagagtgtgccactgcgtggagcgcgccgctcctcatagggcgcttgcgcaggctccgctccctgagcggccgctttcctggtctccaggcaacgcgtacggcgctgtccactgtgctgaagccgcacaccaagcgccgcctctagctgcaggctcacggcgcccccagctctcctaagtgggcggtgccaacaccctaaagcagggaccactaagcctcctttgcgccctatccccagtttatctcttggtaataggtagagcccacttccctccacgttggctgagaaagccctaccgtcccatccagctcagaggaaagcccaaggcttcccgcgatttcatgccgtcacctccacaccctcatccgctcacctccagccacactgacctccgcgctcacaacagacaatccagacacattcccacctccaggcctttgctcttaactgttcacgaggcctggagtgctctctccgattccgcatgactcctccatcctcctttcaggctcaaatcccaccgtctcagtgagcccagccctgactatcctgtcctactgaacacattgacctctctctatatgtatgtatgtatataattttatttttagttttttcgagacaggatcttgctctgttgcccaggctggagtgcagtggtgcgatcatagctcactgcagcttccacctcccgggctcaagctatcctcctgcctcagcctcccgagtagctgggactacaggtgtgcagcactgcgcccgtataatttttgtatttttagtacagcagaggttttcgccgtgttgcccaggctggtctccaactcctgggctcaagcgatctacctgcctcagcctcccaaggtgctggaattacaggcgtgagccactgcatccggactagaatatatttgtttaagtgggtggattaagcctcttttgataattgttgaagctgggtcattggttacaaggtgataactatgcaattctctgtccgtttgtctatgcttgaaaagtgtgtaatgaagaatgtcaggtggcacagtgatctccaggaggggcagagaaccagcatcaggggctacacagctagtggtggtaccccaacgccaaccccacacatagcccaatctcacaatgactaagtacagagactgtagttgatgctacaaggattactgtggctggagaccagatgtgcaaccacctataaacttcctgagtgtagcttcagttttgacataaactgttcttattttcatgaatctctgtgacatggatgtagctgcctccaactcctgtccctagtgttttcgagcccaagggcctgtttctccttatcattggcttttttctttttctttttctttttttttttttttttgagacggagtttcactcttcttgcccaggctggagtgcaatggcacgatctcggatcaccacaacctccatctcccaggttcaaccaattctccttcctcagcctccttagtatctgggattataggtatatgccaccatgcccggctaattttgtatttttagtagagatggggtttctccatgttggccaggctggtctcaaactcccgacctcaggtgatccgcccgcctcagcctcccaaagtgctgggattacaagtgtgagccactgtgcccggccaccaccactggcttttgatccaaattgtgaatggcagaacctgagccttgtgcagcctggctgcagggcaggctgggaaagtaactgtcaattataacttctatggaaaggcaggcttagccttaaaaaatatgacattctctcaatgcaggggtgtatgagcggggtcaggtgttaggtggccaagaaaagaaggggctatactagcttcagaacagcaaatccaggcaacccttaatccaatcagccattcatccaatcatggtgattgcattctaaaatgcagaggattccctccaacatcccagaagctttggataaccaagaattgcaggcaggtcagagctccaagataaggtcacccagaaaagaaagagactcactttggataagataatgaaatgctgtttttggaacctaaaccactgagaggcaacattggctgcacacagaaattccttgaggcttaaaacaaaaaacaaaagaaaattgatgactgagtctcatccccatagatttttttttttaagagatgatcggccaggtgcagtggatcacacctgtaaccccagcactttgggagactgaggcaggtggatcacctgaggtcaggagttcgagaccaacctggccaacattgcaaaaccctgtctctactaaaaatacaaaaaattagctgggcatggtggtgggcgcctgtaatcccagctactttaggaggctgaggcaggagaatttcttgaacccgggaggtggaggttgcagtgagccgagatcgcaccattgcaccctagcctgggcgactctaatttctggcctcaagcaatcctcctacttcatcgtcccaaagtacataagctactcaccatagattttagtttaagttgtctgggcatagagatagttaaaaactccacaggtaattctatgtgcagccaagagtgaaaaacagtggttctgaaacgagtgggcatcagaataacacagaaagcttggcaagaagcagacttaaacacatattggccaggcgctgtggcaatcctcctgcttcagtctcccaagtaactggaattatgggtaattttttaactttttttttttttttttttttgccatgttgcccaggctggtctctaactcgtgggctcatatgatccacccaccttggcctcccaaagtgctggaattacaggcgtgagccactgcgcctggtaaacattttgaaaaatagaaatattagctgggcacggtggctcacacctgtatcctagcactttgggaggcctagatgggtggatcgcttgaggtcaggagtttgagaccagcctggccatcatggtgaaaccttatctctactaaaaacaaaaattagccggacgcggtggctcacacctgtaatcccagcactttgggaggccaaggtgggaggatcacctgaggtcaggagttcgagaccagactggccaatatggagaaaccctgtcgctactaaaaatacaaaaaaattagccaggcgtggtggcgtatgcctgtaatcccagctactcaggaggctgaggcaggagaatcacttgaacccaggaggtggaggttgtagtgagccaagattgcactattgcactctccagcctgggcaacaagagcaaaactccgtctcaaaaaaaaaaaaaacaaaaaacggccgagtgcggtggctcacgcctgtaatcccagcactttgggaggccaaggcaggtggatcaccaggtcaggagatcaagaccatcctggctaacatggtgaacaccggtctctactaaaaatacaaaaaattagctgggcgtggtggcaggcgcctgtagtcccagctactcaggaggctgaggcaggaaaatggcgtggacctggcaggcagagctttcagtgagcagagattgtgccactgcactccagcctgggaagcagagcaagactccatctcaaaaataaaaaaaaaattagccgggtgtggcagcaggcacctgtaatcccggttgcttgggaggctgacgtaggagaatcgcttgaacctgagaggcggaggttgcagtgagctgagactgtgccactacactccagcctgggcaacagagtgagattctgtctcaaaaaaaaaaaagaagaaaagaaaagaaagaaaagaaatagaaaagaaaggatgagtgttgtagacaaaggcaggtgcaaaggccctgaggttggcttgctggtgggcaggggtgttttccaggcgggttttccgggtgtggccttactaaggatgccccaccatctgggcaaccggcatccttagcctttcttacaggatagggggcttgaggctcccttagacaccctcttggccagagtagctcagtttaagacaattgaaaggacatcttctgggacaatagcgctctctgctggccaggacagatatcagatccagttgtaatgataacaattactatataatattgtatattattattatctttttttttagggtttcggtctcactctgttgcccagcctggtgtacagtagcccaatcatagctcactgcagcctccaactcttcagctcaagtgatcctcctgcctcagcttcttgagtagctgagactacaggggcgtgccaccacaccatgttaatgtttttgttttgattttgtttttgtttttgttttttagatgaagtctcgctttgtcgcccaggctggagtgcagtggcgcaatcgtggctcgacctccgcctcccgggttcaagcgattctcctgcctcagcctcccgaatagctgggactacaggcacgcacccccacgcccggctaatttttgtatttttttagtagagacggggtttcaccatactggccaggctggtcttgaactcctgacatcgtgatccgcccgccttggcctcccaaagtgctgggattacaggcgtgagccaccgtgcctggctcacaacctgttaattttttaatttttaaaacttttttttctttttgacacagagttttgctcctgttacccaggctggggtgcaatggcacgatctcggctcactgcaaactccgcctcccaggttcaagcaattatcctgcctcagccttcggagtagctgggattacaggcatgcaccaccatgcctggctaattttgtatttttagtagagacggggtttctccacattggtcaggctggtctcgaactcccaacatcaggtcatccgcccgcctcagcctctcaaagcgctgggattacaggcgtgagccaccgcacccagccacaccagcttaattttttttttttttttttttttgagatggagtctcgctctgtcacccaggctggagtgcagtggcacgatctcggctcactgcaagctctgcctcccaggttcacgccattctcctgcctcggcctccggagtagctgggactacaggtgcctgccactgcgcccggctaattttttgtatttttagtagagacggggtttcactgtgttagccaggatggtctccatcccatgacctcgtgatcctccctcctcggcctcccaaagtgctgggattacaggcgtgagccaccacccccggccctttattcaatctttacaaagtctttatgccgagatgctgtaattcgccacattttatccaagagaaaattatggctaagagagtctctgattgtagctcgaaagtgctagggatgggattcgttcccagttcaattctgattcttcgctttagcgtgttgtgggtaggagttaaatgggcccccagccaggaccaggggttcaaatccgttgccatggtcccccgacgctttcccgggctccagaacggatcgcgtggtcacgtgacagcggccaacatggcgccgcccactgtgtggtacggcccacgtggttccgacagtcaagatggcgggagcagctacccaggcttccctggagtcggccccacggatcatgcggctggtggccgaatgcagccgctccagggcccgggcaggcgagctgtggctgccgcatgggacagtggccactcctgtgttcatgccagtgggcacgcaggccaccatgaagggcatcacgaccgaacagctggacgctctgggttgccgcatctgcctgggcaatacctaccatctgggtctaaggccggtgggtgggctctgcccgcgcggggaggcggcgaggcggcgaggcgtggggagccatggagcgtcctccaggcccggacactcctcccaaagtcaatcgaccagctgtattgagcgcccccaatgaccaggccttgtactgggcgtgaaagagcagcagggactaaagctggccagatctgtctcccaagaagggcccccagggacgcggtcacccctaacctgacactttcttccatcaacccagggacccgagctgatccagaaagccaacggtctccacggcttcatgaattggcctcataatctgctaacggtgagctgaggagagagccgacgttctagggcccttctctggagtgaagggtccccatctccaccccctgacagctttgcggtggggtttcccttaggacagcggcggtttccagatggtgtcgctggtgtctctgtccgaggtgacggaggagggcgtccgcttccgctccccctacgacggcaatgagaccctgctgagcccggagaaatccgtgcagatccagaatgcgctgggtgagaggaccctggggagccgcctccttaccctgtctgtcagggggtgaagtttacacggggcctgttttttagctgttgtgtggctttgagcaggtcactcctcgctgagcttcagttgaaccaactcaaagcgggggtaaatagtagcaggtctttggtagaattgttgacaagtacatatgagatgatgtcagtaaatctccatcccagccatgtagtagcttaagtattattattgcagtttttctctcattagcaaattaagactggacgtggaagctcatgcctgtaatcccagcaatttgggaaactgaggcgggaagatcacttgaggccgggagttggagaccagcttgggcaatacagggagaccctgtctctaccaaaataaaaaataaaaaataaaaaaaacaaattaattggacaaatatctgttgaaataatggtggcaacaagaggattggggaggctttaggcttctcccatatcctcaatatccttctttttttttttttttttttttttttttgagacagaattttgctcttgttgcccaggctggagtgcaattttgcgatctgagctcactgcaacctctgcctcccgggttcaagtgattctcctgactcagcctcccgagtagctgggattacaggtgtgcgccaccacacctggctaattttgtatttttagtagagacagggtttctccatgttggttaggctactctcaaactcctgagctcaggtgatccgcctgcctcggcctcccagagtgctgggattccaggcgtgagccaccacacctggctttttttttttttttttttttttgagacagagtcgcccaggctggagtgcaatggtgtgatatccagtcactgcaacctccacctcctgggttcaagtgattctcctgcctcagcctgctgagtagctgggattacaactgcttgccaccatgcccagctaatttttgtattttttgtagagacgggtttcactatgttggcaaggctggtctcaaactccggacctcaggtgatccacctgcttcggcctcgcagagtgctgggattataggtgtgagccaccacgcctggcccaatatccccatttcttgataaagaaccatggcaacacagggtcaaaacccctcttcccctcatcattctaatagattgatgctgtagggaggaagaaatattttttcttcttagattcatggctgaagcccctataacaaaaacccttataagaaaagaagccacgtgctgggtgcggtggccacgcctgtaatcccagcactttgggaggcggaggcgcgatcatgactcactgcaacagctgcctcctggttcaagcaattcgcctgccttagcctcccaagtagctgggattacaggtgcccgctaccacacccagctaatttttgtattttcagtagagatggggtttcaccatgttggccaggctggttacgaactcctgacctcaagtgatctgcccatcttggtcccccaaagtgctgggattacaggtatgagccactgtgcccggcctataagtttatttttttatgtttatttatttttatgtattattttgagacagagtctcactctgtcacccaggctagagtacagtggcacaatctcaggtcactgcaacctctgcctcctggcctcaagcaattctcctgcctcagcctcccaagtagctgggattacaggtgcatgccaccacgcccagctagttttttgtatttttagtagagacagggtttcgccatgttggccaggctggtcttgaactcctgacctcaagcgatctgcccgccttggcctcccaaagtgctgggattacaggtgtgagccaccatgcccggccaaatattttttgtagagattagagtctcactacattatctgggctggtcttgaactcctggctacaaacagtcctttgccttgaccattcaaagtgctcatgttacaagcatgagccactgtgccagcccccatgtgttttttgtttgtttgtttgttttttctggagatggagtcttgcttagtctcccaggctggagtgcggtggcgcgatctcggctcactgcaagctccgcctcctgggttcatgccattctcctgcctcagcctccggagtagctgggactacaggcacccgccattacgcccagctaatttttttgtacttttactagagacggggtttcatcgtgttagccaggatggtctcgatctcctgacctcgtgattcgcccatctcggccttccaaagtgctgggattacaggcgtgagccaccgcacccggcctctttttttttgaaaccgagtttcgctcttgttgcccaggctggagtgcaatggcgcaatctcggctcacagcaacctctgcctcctgggttcaagcgattctcctgcctcagcctcccgagtagctgggatgacaggcatgcgccaccatgcccggctaattttgtatttttggtagagacggggtttctccatgttggtcaggctggtcttgaactcccgacctcaggtgatccgcctgcctcagcctcccaaagtgctggcattacaggtgtgagccaccatgcccagctaaagttctagctttttaatgaatgtcgtaatttttttttttttttttgatgtggaatctcgctctgtcacctaggctggagtgcagtggctcgatcttggctcactgcaacctctgctgcccgggtttaagctattctcctgcctcagcctccccagcagctgggactacaggtgcctgccaccacgcctggtaatttttgtacttttagtagagacggggtttcaccttgttggtcaggctggtcttgaactcctgacttcaggtggtccacctgcctcagcctcccaaagggctgggattacaggcgtgagccaccgcacccagccccatatttattttttcgtcttttctttttttttttcttttttgagaaggagtctcactctttgaccaaggctggagtgcagtggcactgtgttggcttactgcaacctctgtcttctgggttcaagcacttctcctgctgcagcctcccgagtagctgggattacaggtgcccatcaccacacctggctagtttttatatttttagtagagacggggtttcaccatgttggccaggccggtctcgaactcctgacctaaggtgatccacccgtctcggcctcccaaagtgctgggactacaggcgtgagtcaccacgcctgcccctttttttcttttttgagacacaatctcgctctgtcacccgggctggagtactgtggtgcaatctcggctcactgcaacctttgcttcctgggttcaagcgattctcctgcctcagcctcccaagtagctgggacttcaggtgcatgccaccatgccgggctaatttttgtatttgttgtagagacagggtttcaccatattggccagggtggtcttgaactcccgatctcaagtgattgacctgctttggcctcccaaagtgctggggttacaggcgcaagccaccaggcctggcctgttcttttttttttttttttttttttttttttttgtggagacagagtctcgctctgtcactcaggctggagtgtagtggtgcgatctcggctcactgcaagcttcacctcccgggtgcacaccattctcctgcctcagttcccgagtagctgggactacaggtgaccgccaccacgcccggctaattttttgtatttttagcagagacagggtttcactgtgttcgccaggatggtgtcaatctcctgacctggtgatccacacgccttggcctcccaaagtgctgggattacaggcgtgagccactgcgcccggctgtggcctgttcttttttattttaaattgttttcatctatttattttcttaataatggagatggggtctctctgtgttgcccagggtggtctcgaactcctgggctctagtgatccttccgcctgggccttccaaagtgtttggattataggtcatcaagtttcattttatgccactaaaccactatgctgtgcaccgtggctcatgcctataatcttagcacttttgttttgtttttgagacggtgtctcgctctgtcgccttggctggagtacagtggtgcaatcttagctcaccgcaacctccgtcttccgggttcaagcgattctcctgcctcagcctcttgagtagctgggattacaggaatataccaccacgcccggctaatttttgtatttttagtagagacggggtttcaccaccttggccaggctggtctcgaactcctgacctcaaatgatccacctgggttggccttccaaagtgctgagatgacaagcgtgagccatcgcgcctgtttttttttttttaaccttttttttttttttttaacacagccttgctctgtcatccaggctggagtgcagtggcacaatcttggctcactgctacctctgtctcccagattcaagctattctcctgtctctgccttccaagcagctgggaatacaggcacgtgccatcatacctggctaatttttgtgtttttaggagagatggggtttcaccatgttggcgaggctggtcttgaactcctgacctcagatgacctgcctgcctcggcgtccccaagtgctgggattacaggcgtagtcactgcgcccagtcagcagagccctgctgatggacgtttggtttcccggtcttgctgtggcacgccacatagcaagggatccctttgtatattttaggattttattttgtgtaacaggataggattttaagctggggagaggcaggatcaaaggcacattctgtaaagctccttctggctgctgtataaacagaccgggaaagtcacgtgggagttagcaagacgggggatggggggatgctcttggggaagtccaacttgtccccatgtgacggcaggctttccccaagcattgcgggctttcccagtgatgttgcccccatctcaccatcaggctcggacatcatcatgcagctggacgacgtggttagcagtactgtgactgggccacgtgtggaggaggccatgtacaggtgtgtatatgctgtgtgcatgtgtgggatatgtggtgggaggggatcctggtccctgtagccttgtctcctaccccctcaccaggcccctggggcttgtgactggggccctgttgcaggtcaatccgctggctggaccggtgcattgcagcccatcagcggccggacaagcagaacctcttcgccattatccagggtgggctggacgcagatctccgggccacctgccttgaaggtagagccatgcgctggcaggcccagggcttggccatcgcggaggtccccacatgggcctggcgtatggcgggactggattgctaatgtgtagaagggcactgcgctagaaaaaatagccggagcaaaggctctcgggccacgtgcagtagaatgtattgagagaatggccatgattccagtagttaatgatcttctaggttttttgtttgtttgtttttgtttttttttttgagacggagtctcaggtgatccaccccccttggcctcccaaagtgctgggattatagtcatgagccaccgcgcccagcctatttatgtatttatttattttactttttttttttttggagggtggagtcttgcactgtcgcccaggctggagtgctgtggcgcgatctcggctcactgcaacctctgcctccctgcaacctccgcctcccgggttcaatctattctcctgcctcagcctcctgagtagctgggactacaggcacccgccaccaggcccggctaatttttgtatttttagtagagacagggtttcaccattttggccaggctggtttcaaactcctgaccttgtgatctgcctgcctcggcctcccaaagtgctgggattacaggcgtgagccaccgtacctggcctctttatttatttttgagacacggtcttactctgttgctcctcctggagtgcagtggctaggtcaaagctcactgcagcctcaaactcctgggatcaagcagtcctgcttcagctttccaaagtgcttggaatataggtgcacgccggtgtgtccagccatgcattaccttttacatgcaatgctttctggtgttttcttttctctttcatttaaaaacaacgacaacaacccgtgcgtcatcaaagtcatttctcaaccacctgcagtttgacaagcaccgccccatggggtgcttctcaaagtgctctgaggcttacctgccccagcacaaactactgaaagtcctggtaaaatgcagctccccttcccatgatccgaccagagttggagctagggaaggcctaggaatctgcatgtaaacaccctgtgtccagttggaggatgctcacattaccttcaaaacctggccccagacaacgcctgcattcctttttttttttttctttttttttttttttgagacggagtttcgctcttgttgcccaggctggagtgcagtggcgtgatctcaggtcactgcaacctccaccttccggtttcaagtgattctcctgcctcagcctcctgagtagctgagattacaggcatgcaccaccatgcctggctaatttttgtatttttagtagggacagggtttcaccatgttggctaggctggtcttgaactcctgacctcgtgatccacccccaccttggcctccagagtgctgggattacaggcttgagccactgcacctggccaacacctgcgttcttgatggcatggcctcttcgggttgaactgggcagctggggcacaagataagcctggacttggaggccagacccaggtttgaatccagcctttggcatatgtagccttggactagtggtttaagctctgcaagcctcaatttcctcttgtttcaggcaagttgaacaatagcacaattctgcagccccttctgtgtcatccaggtcctcagagcgaaagtctaaaatccagaacattggccgggtaccatagctcacacctgaatcccagcactttaggaggccaaggcaagaggattgcttgagaccagtctgggtgacatagtgagatcccatctctaaaaaaagagaattgggccaggcacgctggctcacgcctgtaatcccagtactttgtgaggccaaggcgggcagatcacgtggtcaggagttcgagaccagcctggccaacatggtaaaaccccgtttctactaaaaatacaaaaattaggccgggcgtggtggctcgcgcctgtaatcccagcactttgggaggctgaggcgggcaaatcattgaggtcgggagatcgagaccaacctggctaacacggtgaaaccccatctctactaaaaaatagaaaaaattagctgggcgtggtggcgggcgcctgtagtctcagctactcgggaggccgaggcaggagaatggcgtgaacctgggagacagagcttgcagtgagccgagattgtgccactgcactccagcctgggcaacaaagtgagactccatctcaaaaaaaaaaaaattagccaggcatggtggtgggcacctgtaatcttagctactcgggaggctgaggcaggagaatcatttgaacccgggaggtggaggttacagtgagctgagatcacaccactgcactccagcctgggcgacagagcaagaatctgtctcaaaaaaaaagaaaaaaagaaaattagcacgcaagcatgggagtgtgtgcctgtgatcctagatacttgggaggctgaggtgggaggatcgcttgagcccaggggttggtggctgcagtgagctatgatgacatcactgtactgcagtctgggtaacacagtgagaccctgtctcaaaaaaaaagaagaaaagaaaagagaaaaaacttagaatgccctgaaaaatttgcaactcatttcatggctaacttagatctctcattttttatcccagttgttacaagtattcacatatttttatttttatttattttttatttttttgagatggagttttgctcttgttgtccaggctggagtgcagtggcaccatctcggctcactgcaacctctgccttctggtttcaagcgattctcctgcttcagcctcccgagtagctgggattacaggcaccagccaccacgcctggccaatttttgtatttttagtagggatggggtttcaccatgttggccaggctggtctcgaactcctgacctcgtgatccacctgccttggcctcccaaagtgctgggattacaggcgtgagccatgtgcccagcctatttttattttttaaattttactttggccgggcgtggtggctcatgcctgtaatcctggcactttgggaggctgcagtgggcggattacctgaggtcaggagttcaagaccagcctgcccaacatggcggaaccctgtctctattaaaaatacaaaaaattagccgggcatggtggtgggcgactgtagtcccagctactcggggggctgaggcaggagaatcacttgaacccgggaggcgagggttgcagtgagccaagatggtgccattgcactccagcctggatgacaagagcaaaactccatctcaaaaaaaaaaaaaaaaaaattaagttctgggatacatgtgcagaacgtgcaagtttgttacacagctatgaatgtgccatggtggtttctgcacacatcagcccgtcatctaggttttaagccccgcatgcgttatgtatttgtcctaatgctctcactcccctttcctccaccaagtcttaacatattttgttgtacaaatattacagtgtttgatgacaggctattgggtgttttgttgttgttgttgtttcgttttgttttgtgagacggagtctcgctctgtcgcccaggctggagtgcagtcatctgatctcggctcactgcaacctccacctcccgggttcaagcgattcttctgcctcagcctcctgtgtagctgggactgcgggtgcccatcaccacacctggctaatttttgtattttttagtagagacaggatttaaccacgttggttagcctgctttcgaactcctgacctcgtaatctgcctgccttggcctcccaaagtgctgggattgaaggcatgagtcaccgcgcccggcccttttttttgagatggagtctcactttgtcacccaggctggagtgcagtggtgtgatcttggctcactacaacctctgcctcccaggttcaagcgattctcctgcctcagcctcctgtgtagctgggaccaaaggcgtgcaccaccacgcctggctacttttcatatttttagtagagacagggtttcaccatgttggccagattgttcttcaacaccagacttcaagtgatctgcttgcctcggcctcccacagtgctgggatgacaggcgtgagccactgcgcctaacatgacagctgttactcagcatgtgggatgtttactgttctcacatctggaaaactctgaattctgaaacacatctggttccaacagtttcagctaagggactgtgggctgtgcctcttctgagtactgaaggaaaaggtcttgcatacagcaggcactcaataaatgttagctgagatcagcagtagtcccagcccctagacagacagacaaactgatggaccctctcctctgtctccctctccgtctccctctccgtctctggctctgtctgtctgtctctgtctgtttctctgactctctccctgagcgactctggaagtctgggcagggtgtgttctgggattgaagaccaggcgcatttcctcttctgtggccctcaccttaccctgtaccctcagagatgaccaagcgagacgtgcctggcttcgccatcgggggcctgagcgggggtgagagcaagtcgcagttctggcggatggtggcgctgagcacctctcggctgccgaaggacaagccccgatatctgatgggggttgggtatgttgtggatagggaagccagagccctacctgtgggaagtggattcctggggaccccctaccctgcttggggaggtggcatttgggggaaacggacacaggtctgatctgaggagactaggaagacatggctgtcccttgggggccattctgagggaatatggcccagtctggggcagtgtgagggttgggaggggccctgggaagcccctgaggttctctgccccctcccgtcatggctgcaaccccagctatgccactgatctggtagtctgcgtggctcttggatgtgacatgttcgactgcgtcttccccacacggacagcggtgaggctctggcagaaggaggtcagggcgggagacgggtgggggactagggaggcaaggttaggggtggggggtggggagaatgaagccctgggtgacgcccctttccctgcccttcctctcccacagcgctttggctctgccctggtgcccactgggaacctgcagttgaggaagaaggtgtttgagaaggacttcggccccatagacccggagtgcacctgccccacgtgccaaaagtaggcaggatggcactgggagctggggcagggcatggaggggacagggcctggccgtgctgagctgtcccctgccgctctacaggcacagccgcgccttcctgcacgcactgctgcacagtgacaacacggccgcgctgcaccacctcacggtccacaacatcgcctaccaggtgagccagtgcccggggcaaggtgggcgggggtgtcctaggtgcgtatgccccacgctgacctcccctccccgcagctgcagctcatgagcgccgtccgcaccagcatcgtggagaagcgcttcccggacttcgtgcgggacttcatgggcgccatgtacggggatcccaccctctgtcccacctgggccactgacgctctggcctctgtgggaatcacactgggctgacctggcattgggagagggagggaggaaggaagggagggaggggctggaagatactgaaggattcctttttgaaaggttttttttattgtaacttacagagtgtgtctgtgtcttcttgaggaagtggcctgtctgggtccccctcccagtctgagcgtcattgcagtggaatatctccccttctcaccaatcataacacgtcactgtggcagcagcggatagctggaaaccacctgccagtgcccagcatgtagggcgtgcccctagagcgggagctgccacctgcttcctggggcccaggccccccagccaccttggagggaggtactgttggcctctccttttttacagctgaggaagcaggcccagggaagggagggaacttgcccaaggtcatcaccatcaaagaaatggtatcttggctttaaggcatacactcctagtctgacttttataaatatgaggcttaatctcctatttttttctttcttttttttttttttccgagactgagtctcgctctgtcacccaggctggagtgcagtggtaggatctcggatcactgccacctccgcctcccgggttcaaacgattctcctgcctcagcctcccgagtagctgagactacaggcgcgtgccagcacgcctggctaatttttgtatttttaatagagatggggtttcaccatgttggccaggctggtctcaaactcctgacctcaagtgatctgcctgcctcagcctcccaaagtgttgggattacaggcatgagccacagtgcccagcctcttttttttttttttttttttttttttgagactgtctccctttgtcatccaggctggagtgcattggttcaaacacggctcactgtagcctcgatctggagccgccacacccggtctactcttgcaacttgatgttgcatgtacagtcgtgttccattttacggaggaggacactgaggcacagaggaatgaagtttacatggtcactgtcactttcttagtccgttctggctgccatatataacaaaataccatcaactgggtggcttataaacagcagaaatttatttatcacagttctagaagctgggaaattcaagatcaaggtaccagcagattcagtgtctgttgagggcaaacttcctagatggcgatcttttctctaatctcacatggcgggaggggcaaggcagctctctggggtctcttttatgaaggcgcagtgagaagctcagcaggtttgtgaaaagaaaaaaaaatacataagggcacaaatcccattcacctaatcacctaatcgccttccaaaggctccacctccaattaccatcatgttggggattaggtttcatcatgtcaatcttggtgtggtgggtgatggggtagagggctggtctataaacattcagaccataataatcagtaaataaacaggcccaggatctaacccagatatgatcagttacagagctagtgatcttcaccagcctgggcaacacggtgaaactccttctttacaaaaaatacaggtggtgtgcatctgtgctcccagctactgaggaagctgaggtgggaggattgcttgagcccaggaggttgaggctgcaattgcaccactgcactccagcctgggcagcggagtgagactctgtctcaaaaacaaaaaccagtgctcttcaaaaatgaagtttttgaaatggaaaaagtaggccaggtgcagtggctcacacctgtaatcccagctactctggaggctgaggcaggagaatcacttgaacccaggacgtggaggtggcagtgagccgagatcgcaccactgcacgccaccctgagagacagcgagatttcgtctaaaaaaaaaaaaaaaaaggttggacgtggtggtggctcacacctgtaatcctagcactttgggaggccaaggagggcagatcatgaggtcaggagttcaagaccagcctggccaacatggtgaaaccccatctctactaaatatacaaaaattagctgggtgtggtggcacgtgcctgtaatcccagctactctggaggctgaggcaggaatatcgcttgaagccaggacttggaggttgcagtgagccaagatcgcactactgtactccagcctgggagacagagcaagcctccatctcaaaaaaagaaaagaaaagaaaaaaaaagtccaagcgcggtggctcacacctgcaatcccagcactttgggaggccaaggagggagggtcatctgggtcaggagttcgagaccagcctggccaacatggtgaaaccccatctctactaaaaatacaaaaattagccaggtatggtggcaggcgcctgtagtcccagctacttgaaaggctgaggcaggagaatcatttgaacccgggaggcggaggttgcagtgagctgagattgcatcactgcactccagcctgggctacagagcaagactctgtttcaaaaaaaaaaaaaagtgaaaaagtaatacatgtatgtaatccacaattcaaatcacatcaaaagtgcaactacttttatcaatttatgtatttttccagcaattttccgtgtgtacatatggttttcatgcatgtcagcatccttcacacacagttctgtaccttgcttgttttttcctcttagtatatctcaaattatttatacttcagtacatgaagagtttcctcaacgtttttgtttgtttgtttatttgtttttgagacggggttttgctcttgttgcccaggctggagtgcagcggtgcgatctcagctcaccgcaacttctgcgtcccgtgttcaagcgattctcctgcctcagcctctcgagtagctgggattacaggcacgcaccaccacgcctggctaattttttgtatttttagtagaaacgtggtttcactatgttagccaagctggtttcgaacctctaacctcaggtgatctgccctccttggcctcccaaagtgctgggattacaggcatgagccaccgcacctggcgctttttgcctatttctttgagacctggggttttgggtcacaaaacaggcaaatgccatgagccaccctcctcctctttctccatcttcttgtgctgcctcaggtcagagcacttacctgctcctgccttctcactgggtttccttgtctctggcctatttgtctccagaggggtcaaaacacttcaaatcctcctatttgtctctgtccactgtcaggagttccagttcccagaaccccaattttgcctacaaaatagcgtgtcttttcacggggagaggatttgttgagttttagtgggtactcaaaaagatctaaagccagttgggggggttcacacatgtaatcccagcacttttgggaggccggcctgtgagggtcgtttgggcgcaggagtttgagaccagcctggacaacacagcaagaccctgtctctataaaaaataaaataaaaataattagctgggcatagttgcgcacgtctgtggttccagctactcgggacgctgaggcgggaggatcgtttgagcccaggtgcttgttgaattgagctatgagtgcactactgcaccccagcctgggcaacagagtaaggacccagtttctaagaaaagaagattcattagctagacgcggtggctcacacctgtaattccaacactttgggaggccaagacgggcggatcacttgaggccaggcgttcgagaccagcctggccaatatggtgaaaccccgtctactaaaaatacaaaattagctgggcgtggtggctcacacttgtaatcccagctattcgggaggctgaggcaggagaattggttgaaccggggaggcggaggttgcagtgagccaagatcgcgctactgcactccagcctgggtgacagagtgagtaccccgcctcaaaaaaaagaaaagaaaaaagattcatgatctgctaaagttgaagaagtgggggaaaacattggagtgttagcggcgtcaagatcgggcgtgagcagaaagggcacagcatttgcaaaggcgtggaggagtgattttattgcgttctatccctaggaagcaatgacttggcctctaccatttgcagagcgcattgggaccctgctcccagagctggtttgcagtctgggaactgagatgcgctctgggacttgtagttttccccagtgccaggaaactcaaaaatcgagacatcggatcccaccacgaggtgtcgcccttgagcgagtacggtgggatctatcctatacttcagaaggctgttgcagacatccaacaatcacaaggaagaacgggagtttttctgattgacagatatggttctcaatgatagtcaagattcggatgttaaagcccgccctcttttgcctggttggctggagcaacgaagtgatatttatatgaaccaatgggaaattcttagggaacgaggtagtagctcaatccccaacaccattggtccacattgtctactggcacgtctgcctgccaataagatggtggaacttcgccaatgggcagagccaacgtgcctttttcggaaacacccccttcctctcttgacaacttgctttctgccgctattggctgttgcacaacagtgacggttcttttgtccaataagtcagcaagacggtccccagggggaaggtttactcaaccataggcccgtgcctagtttttattggctagtgtatccgagtggcggtgcagcaggccagtcgcgtgcggcgcgagtgctttgggcgcagcccccggggccggggcgggaggtcgctcgggtcgggtgtcgcctgagaaccggatgaggcggcgaccgtgaggccgagccgggagcgggcgtcttgccgaggcccgggcgggcggggagcaacggctacagacgccgcggggccaggtcgttgagggtcggcggcgggcgaggagcgcagggcgctcgggccgggggccgccggcgccatgggcaaccgcgggatggaagagctgatcccgctggtcaacaaactgcaggacgccttcagctccatcggccagagctgccacctggacctgccgcagatcgctgtagtgggcggccagagcgccggcaagagctcggtgctggagaacttcgtgggccggtgagcgggcgcggcagggatcgcgggcgggtggcggcctagggcgcggagggcggaccgggaatggcgcgccgtgcgccgccggcgtaactgcggcgcttgcgtgcccgcggcggggaaccggacggggtcggggaggcgggccctgtgggacgccctgggcagaggactccctgcaggggctccggagcaggcccgggccccaggggcggtgtcacgggccagggcgccgtaggacaggaggtgcgctggaaccctgcggtccatctggtcccagctttcgtgggtgaagtctgccatctggttggccgtgggtctggggtagatccctcttctgctctttcgggctgtccatcagaggtgaaaccggccatctagatatctattggggcgaccgctgcggtctggctggcttgttcttgtatctggagctgcccccgccgtctggttggctgtctctctgtcctgggcaagcctccctgccaccaccatttggttgtccatctgtccagtcccacctggcagccccctgctgtctggctagctgtccagggtgacctctgctgtctggccgcccatccgtgcccctcacagactttaacactgagcagtccctctgttgggtgacaccagctggcctctactgtctgactggctagctgactcctaggggaccctgtttgattctctctggctgactcttacagcttgattcctggctagcgctggctcctctcttccgtgtgaattcttctgtctgtctggccatctcctagtctgcccatgactacccctgagtgtctggcacaacggctctggaaaggggtggtaggagggtagaggggagaacagagctgaaggaggaggtttggaccctacttcccctctcagctggaaggaggactctgggggtaccttacttcaggattcctttccgagtgctagaacacaggggcccgcctcccagctacagcctacaaattgggggccctcctttggagcctgggaaggggcttcttgcgtgatcaggcctcagtggctagcgctgggatgtagccttctctggacagccttgagaagccgcggtgtgcccatctgtccagtgggcaaactccactctctggggctgtttccaggattcaggaagcaaatgaatgagaacagcccgtgcagccacctctccctcccaccaacccctcttgcctttcttgtctcccagatgggcggccacttctccattccaggaactactcatttgtggtggtgtggctgccaaatgataacatcctcctcctgtcattattgtcattgttattgttgttatcattgtcaagggataatgtcccttcttgattcaacatcttgaatcccaagtaaggagtggggtggaggctgtgttatcatccccaccttagctgagctgggaggctcagaagggactgtgatcacccaaggccactaggctggcgtaaggccttgtgtctgccatcccagagccttggggctttgctccaagcagcacaaatctcctcttttgctaccttgtctctagctcattgccttctgtctaccgtggtggaaaggtgtggacttgcagccagctgggcctggcctgatctcaggctggactgtggtgtgggcccctttgagtgaccatcttcctgcctgcccaggcttctgggacgggggtggggggtgtttgcaaagctctgtctctttcacttgccttgtgaccttgcacaggttgtcttggcctctctaagtcttggttgactctcctaaacaagtttattttattttatttatttatttattttttttttttttgagacagagtctccctctgtcatccagtctggagtgcagtggagcaatcttggctcactgcaacctctgcctcccaggttcaggccattcttctgcctcagcctcccgagtagctgggattacaggcgtctaccaccaagcccaactaatttttgtatttttagtagagacggggtttcaccatgttggccaggctggtctcaaactacttacctcaagtgatcctcatgccttggcctcccagagtgctgggattacaggtgtgagccaccaagcctcgccccaggagttccaagaccagcctgggtaacatgacaagatgccattctacaaaaaataaaaaaattagccaggtagggtggtagtcccacacctgtagtcccagcaactcaggaggctggccctgggaggactgcttgagcccaggatgtccagactgcagtgagccgtgattgcaccattaccctccagcctgggtgacagaaccagatccggtttcaaaaaaagaaaagaaaaagtgcttacttacctaacgcactgcctggcacatagtaggtctacatggatggggctattgttgtttatctggctggttcctttgctatcagggacaaaagctaaccagaatgaaagtgctttcacgttacacacttaagccttatgagggaggcattgctataatccccattttacagagcaggaaactgaggctcagatagctgagcagaacactctcactggaggctgtaaagtgaggagttaggtgttctgggttgggaacctgggtctctctcccatccttacctctcctcagtccctctaccccttgcctttctctcctgtctaccatggtgtctggcagctgccggccagtatggagctggttcctgtggcgacctcctagaatcctgcaatgcaggagttgctcattatatatatatttttacaccgagtctcactctgttccccaggctggagtgcagtggtgttatctcagcttactgcaacctccacctcccatgttcaagcgattctcatacctcagcctcccgagtagctgggattacaggcgcgcgttaccacacccggctaatttttgtatttttagcagagatggggtttcaccatgttggccaggctggtcttgaactcctgacctcaggtgatccgcccacctcggccacccaaaatgctggcattaaaggtgtgaaccaccatggctggcctcgttaagagtattaattcagtacctgaaagccaaagttgtaaaaaggcctctctttgggtatgaggggctcaaacaaggcttacttttttttgggggggtgtaagagataaggtctctctttgttgccgaggttggagtggaggggtgcagtcctagctcattgcagcctcgaactccagggctcaagcaatcctcctgcctctgcctctaaaagcactaggattacaggtgtgagccattgcgccgagcctggattttctaaggatgtggtccgagtgggaacagcccagttagttcagccctatagctggaagtccagatcactggctctgggggccaaggcctgcctgctgggtcttttgttttacctgcgtagcttttgtttttaataagactttccagtgttagatttccagtcaatatccggatttcttgtggctctaagacactcagatctatagagttctgagttgtcatgcaaaggctgtgggcctaaggcctggttccaccatgtctggctgtgcgactcggccacgtggatttggcgttctgggcctcagattccttttctgtaagctgagggtggtaactggtaccctggggcctagatgggtgattgggtgatgcgtgccgagtgcatgtgtcttatacgcatggtggctgttgttgtaatcagtttcacctggcgttgctgagcctttgtcccttgtggcagtaatggcttcgatttcagaagcaccagtcactgtcccatcagactaagagtggccactccagctgccacagtccccactactccctagcactcacccaggcctagatcattttgcttggagcctcctggccctggaacctttgagtttgagacccctggcttgtctgcggtgcaccagcagatagaactttggccctaaggagaaaggagggcatcactccctcttgacccttgtcatttagcctcaggggctggccagaaggaaggccttaggcattcccgcaccctagcctcccgagtagctgggactgcaggcacccgccaccacgcctggctaatttttgtatttttagtagagacgaggtttcaccatgttagccaggatggtctcaatcttctgaccttgtgatccgtccacctcggcctcccaaagtgctgggattacaggcgtgagccaccgcgcctggcctgagatagggtcttatactgtcacccaggctagagtgcagtggcaccatctctgctcactgcagccttgacctcctgggctcaagcgattctcctacctctcagcctcctaagtagctgggactacaggcacgtgccaccacgcttggctaatttttcattttttgtagatacagggccttgctgtgttgcccaggctggtctcgacctcctcgcctcaaatgatcctcctgcatcagtctcccaacgtgctggcattacaggtgtgagccactgcgcccagcctcctcttcattaaaatacaagttataatagcacttctttccctttcttttttttttttgagacggagtctggctctgttgcccaggctggagtgcagtggtgcgatctcggctcactgcaatctcgcctcctgagttcaagtgattctcctgtctcagcctcccgagtagctgggactacagttgcgagccaccacacctggctaatttttttttttttttttttgagacggagtttcattcttgttgcccaggctggagtgcaatggcacgatcttggctcaccgcaacctcccctcctggtttcaagccattctcctgcctcagcctcctgagtagctgggattacaggcatgcaccaccacgcctggctaattttgtatttttagtagaggcggggttttcccgtgttggtcaggctggtctcgaactcccgacctcaggtgatctgccggccatggcctcccaaagtgctgggattacaggcgtgagccaccgtgcccggctaatttttctatttttaatagagatggggtttcgccatgttggccaggctggttccaaactcctgacctcaagtgatcttcctgccttggcctcccaaggtgctgggattgcaggtgtaagccaccgcgcccagccccgtcttctttaaaataggagttataatagcacttctttccctttcttgaatagggattaagtgagacagtttggagtgcttggcatagaagaagtgcttaaaacattaggtgttgttcgttcattaaaaaatgtttcctgagtacttttactgtgtgcctggggacatggccctgagcaagttaccagaacttctgctctggaggagctggcctttcagcaggaagcaaataaaggagaagcatgggccacttagtggctcaggcccacaatctcagctctttgggatccaggcgggaggatcacttgagcccagaagttggagaccagcctgggcaacatagaccccgtctctacaaaaaataaaaacattagctgggcatggtgacacctgtagtcccagctactcaggaggctgaggccggaggatggcttgagcctgggatttcaaggctgcagtgagctctgatcacgctactgccttccagcctgggcggaagaacgagacctcgtctcaaaaaaaaaaaaaaaggcgataagtatgatggaaaaaaggatcaaggagcaggatgagggagagatcacagttggagggggtacattttattttattatattattattctttgagacggagtctcactctgtcttccaggctggagtgcagtcacgcgatctcggctcactgcaacctccgcctcccaggttcacgccattctcttgcctcagcctcccgagtagctgggattacaggcgcctgccaccaggcccggctaattttttgtatttttagtagagatggagtttcaccatgttagccaggatggtctcgatctcctgacttcgtgatccgcccgcctcggcctcccaaagtgctgggataacaggcgtgagccactgcgcctggccagagggggtacattttaaatagggaaattggtgacatttgagcagagccttgaaggaggcgaggaaggaacccctggagacgggaagagaatccagtgcaaaggtcctgatgtgggaggatgcccggaggccagtttagcaggccagtggagggagatcagatctgggagatattagggtgggaccaggcctctaggaacattgtgggcagggaggctgtctgagcagagggaagtaaagctggtggcgctactgctgtccctctggacctggccaagctgagggctctctcctttgatttccagcttcaactcagttttctcagtaagcagactccacaggcatgtaggcgccccgtgccatttttcttttaataagaagcagctgtgccggggatgctggcgtttccagctgcgtttttatttggcctttggtgatgtgtccctccagggatatgtggatgagccgcgggggcactgcctgtgcctcagtgggtgctgcaccagtgcacatcggatgcccgttggctcctgtccctgacagatggaggggcacgtgatgtgttccttgggctggtttgtccctttaacagatcttattagtttagagccacttggaaatgacatcttctgtttccagtgactttccttttgggcaaagacaaattgcatcttgaaaaggccatacatggccgggcatggtgactcacacctgtaatcccagcattttgggaggccgaggcaggcagatcacaaggttgggagtttgagaccagcctggccaacatagtgaatcccgatctctactaaaaatacaaaaattagccaggtgtggtggcgcatgcctttagtcccagctatttgggaggctgaggcaggagaatcacttgaacccaggaggaggaacttgcagtaagcggagatcacgccattgcactccagcctgggggacagagtgagactccatctcaaaaaaaaaaaaaaaaggaaaaaaggaaaggccatgcaaggctcggttagggtggtctgcagtgctgggcctgctggaattggtacagtccagagggatctgtgggaatatggaaggcttggttctgccacacaccaaaaaagtgacctcacttctctgggcctcagtttcctcatctggaaaatgggaacatggtggtctctgcctactgggagtggactgagaatcacgtagcaaattgttgtgaaacaggcagcatttgtgatctcgttggttggcttttgtctccttttatctgggatcaggactctgatgacaggtgtacgtttcttttctcttgctctgtcccccagactggagtacagtggcgtaatcatggctcactgcagcctccaactcctgggttcaggtggtcctctcacctgagtctcctgagtagctgggactataggcatgagccaccacacctggctaattacaaaaaaatttttttggcagggagcgatggctcacacttgtattcccagcacttggggaggccgaggcgggcggatcacggggtcaagagattgagaccatcctggccaacatggtgaaaccctgtctctactaaaaatccaaaaattaggtgggtgtggtggctctcacctgtagtcccagctgctcgggaggctgaggcaggagaatcgcttgaacctgggaggcggaggttgcagtgagccgagatcgtgccactgcactccagcctgggcgacagagcgagactctgcctcaaaaaaaaaaaatttttttttttttagagacagggtcttactttgttgctcagtttggtgtcaaactcctgggcccaagcgatcctcctgccttggcttcccaaagtggtggaattacaggtgtgagccgccgaacccggccttagtttctttttccttaaagagaaggaactcatcattactctgttgatataaatggagtgcctatcagtgcaggcaatgttcttgctctggggatacagccaggaccaggacatgcaggcacgccctgttccccagatcctgaaatatcgaccagaagttgttcctggttcctttctaagtgggaatcatggctgcaaacaagtaattggccgtgagagttatttacacacattttgtgtacggtgatgagaaatgggagaaaaaatgcccagcatcggatcaccagaggtcaggagttcgagaccagcctggccaacatggtgaaccctcatctctactaaaaatacaaaaattagccgggcgtggtggcaggcgcctgtaatcccagctattcgggaggctgaggcggagaatcgcttgaacctgggggacggaggttgcggtaagccgagattgcgccgctgcactccagcctgggcaacagagcgagactctgtctcaaaacaaacaaacaaacaaaaaccaatgataggggatttggccagataagcgtgtccagacaaccgactatcaactcgctactcagagggatctagaagaatctttaatgacccagaaagctgcacaagacctgttaggtaccagatgaaatgggctgtgggatcctgtcttgtttaaaacgattgtatttgctcagtgaaaagaccggaaagacatactctgccctaaccccacatgtgaatcgtctccccatgtgattcttggtttgtttttgctggtttggggattaggtttataatcaggaagacagatttctccaaagctgcgctctaggctgtccaagtgctttttcagagttacttattgacggataacagcccttgataggttcataacattgaaatcccctggtaataacctggattgtttctggatgagggcggaagatggccttggggacagttgtagatttagagaggaggttttcttttcttttctttttctttttttgtttttttttgagacgggatctcactctgttgcctaggctgaaatgcagtggcgtgatcacagctcacagcaacctcaacttcctgggctcaagggatcttcccacttcagcctcccaattagctgggaccacaggtgtgcgccaccacccccagctaattttaagaaattttttgtagaggtggggtctcattattttttgcccaggctagtctcaaacccctgggctcaagtgattctcctgcctcggcttcccaaagtgctgggattacaggcaagagccacggcacccggcctaggttagatttagagttttcagagttggcttaggcggtagaggctggcctttgaatggaaccctgtctcgctgtcgctctcagcgtttatatttggctcagagccacatctgccaaacttctgcccgatttgaatgaaagtgctgaaattataggcccctcggctgctgaaaaaaagtgagaacatcatgtaaaccgtaatttactgggattgccaactacaagctgtaattaagcccttattgtgttaaagctttggaaaaatccaagccaataatgagatatttatagggcattagctacaatctgaataaagggaaaatgtggccctgcgtctgaagcaggactgcaaagagaggaaagacgcctgcttccgggtgcgttttgggtttctgtgaatattggtaactaggtccctgctgggtggtgggaaattttcccctgtggcgtcacccgtagcttgaaccgggagctggatgactgtttcagtttcatctgctgctggacatttatgatgttaagagccagtgtttatggagaatcaccgtgtgccacatgtgcaagatctgaccagtgtcttctctgcccaggggtggcagctgctgctcttagcatccctgctttataggtagagaaactgaggccagagagggagactggcctgaagtcacacagggaggaggacagaggagttggagcttgaactggatgtgggccctctagagccacacatatggcggctttgggtgggaaggtgtgggcctgactcttgagagcagggctgaatggtgggcaccatggcgtttgtatctgaggactgggccaagattacagagggagtgagcaacgcgtggctttggatatgcatcgaggttgtcagctctgtgtccagcctgcgtgtggtaagcagcaaccactctacaccagttgctgggcacccagcagggactgggacagacaggacaggtgaacagttaaatgagcaagaacattctggggcaggcacaggggctcacacctgtaatcccagcactttgagaggccaaggcgggcagatcacttgaagccaggtgttcgagaccagcctggccagcatggcgagccccatctctaccaaaaatacaaaaattagctgagcatggtggtacttgtctgtcgtcccagctacttagcaggctaaggtgggaggatctcctgagcccaggaattcgaggttgcattgagctatgattgcaccactgcgctccagcctgggtgacagcaagacccggtctcaaaaaaaaaaaaaggctgtatgcggtggttcacgcctgtaatcccaacactttgggaggctgaggtgggagttcgagaccagcctggccaacatggcgaaaccccatctctactaaaaatataggcaggagaatggcgtgaacccgggaggcggagcttgcagtgagccgagatcgcaccactgcactccagcctgggcgacagagcgagactccgtctcaaaaaaaaaaaaaaaaaaaaaaaaaatataaaaaattagccaagcatggtggcgggcacctgtaatcccagctactcgggaggctgaggcaggagaattacttgaaggttgcagtgatccgaggtggaggttgcagtaatccgagatcatgccacggccctccagcctgggcaacaagagcgaaactctatctcaaaaaaaacaaaaataaaaatattctgaagagtgagaagcggtttgccctgtactgcattgggtgggggaatggctgcagggggctgcttcacatgtggcttgttgggatgggtgtcctgcagtggaatagccccgccaggacttgggggaacagcatcgcaggccagggaaacagcaggtgcagaggcctcgcacacacccggcccgctgagtgccccctgcggaccggaaaggaccagtaggcacgtgagagttaggacgctgcccgtggaatgccgacttttctaaatttgaattacgcaagtagagcgtggagacagtgttcttggaaaaagggaaaccattacagatgaggaagagcacactgcccagcccgtcccttcctccagctctacctgggagcaccactgtcacttcagggtatgtctagccagacccctctggtgtttctgtacttaggtacatgctggtacctatagagaatacgtggcaccattatgggtggttattttttttttttttggaacaggtctcactctgtcacccaggctggagtgcagtggcacagtcatggctcgctgcagccttgacatcctgtgctcaagccatcctcctacctcagcctcctgagtacctgggacaacaaccacatgccaccacgcccaactaatgtttataatcttttgtacagatggggtttctctatgttgccaaggctggtctcaaactcctgggctcatgcgatcctttcacgttggccccccaaagtactgggattgtagacatgagccacctctcccagccacgtgcatatatttgttgaatgaaagtagctaaaggctggaagtggtgactcacgcctgtaatcccagcactatgggaggccgaggcaacatggcttgagctcaggagtttgagaccagcctgggcaacatggtgagacctcgtctctaccaaaaatacaaaaattagcaggcgtggtggtgcatgcctgtactcttagctacttggaatcccgaggtgcgaggatcccttgagctagggtagcggtggaacttgcagtgagcccacactgtgccattgcactgcagcgtgggtgacagagcgagaccctgtctcaaaaaaaaaaaagtagctaaaaaccagaatggagtgaatttcactgcacagtcatggaggggaccaggcagaggacagccctgggtcttggttttggagactcacagcctgcctggggatgcagggaccctgaagcaaggacatcttcctttggaggaagtggagatttgctccatctatataaagagtaataacagtaataggctgagaccctgaggctgggcagcgtgggtgtctatctgcgttggcttcgagggctgtaagatggggctagcagcgtcccctccagggtgggagtgaggccctgtatggcaacctgcggggtgccccctctgacttttgcttcctgcctggctgctcagtggccctggcaggggcaggcaccactgctctttctgttacaagagacctcctttggataaatctgaacacgctcccatggcagacctatggggcggtagacaagaggccagcagagctgtcccaggccctggtgacacctccatgcccaggtgaaggaggagcaggctacttggagcctgccctgtgacacactttcgcggtgatgagagcttctcagggctgcgatcctggcgggccagtcaagcgggcaggagcagccccagccagggtgaccctgcctgctgggtgatacgccctggcacgaccaggccagccctggggaaagcccccagggcggatcagggagggacacagctgtcctggccatgagacttctgtcttttgtatggatacacagggtccttctagagggtcacagcctccacccccgggaggcctaccagctggccgcgcagccaggatcctgcagccaccaggacactgcctttccaggttgttcttttcttttccttctttttttttttttttttgaggcagagtctcacagtgtcgcccgggctggagtgcaatgcatgatctcagctcactgcaacctccacctcctgggttcaagtgattctcctgcctcagcctcctgagtagctgggattacaggtgtgcaccaccacgcctggctaattttttgtatttttagtagagatggggttttgccatgttggccaggctggtctcgaactcctggcctcaggtgatccacccgcctcggcctcccaaggctctgggattacaggcgtgagccgccgtgcccggcccccaggttgttcttttctacatcaacatcaggggacagtgactgagagaggccacgagccactggctcagcttgacgaaggcttcctgtggtttgggttgatgtatctctctgtcttgcaacactgagttccccgttgtctgggcggaagccagtcagacggaagcccggcttctgtggtgcctgccctggtggcctggacaggttgctgggaagctcaggtcaggctgctttctgaggtggggaggccccacctggaatgtgctcccagcactgggtgaaaattgatgcacaggcttgattttttttttttttttttgagacggagtttcgctgttgttgcccaggctggagtgcaatggtgcaatctcggctcgctgcaacctccgcctcccaggttcaagcgattcttctgcctcagcctcccgagtagctgtgattacaggcgtgcaccatcacacccggctaattttttgtatttttagtagagactgggtttcaccatggccagactggtcttgaactcctgacctcaggttatccgcctgcttcagcctcccagagtgctgggattacaggcatgagccaccgcgcccttaaactcttttctgttaaaggagttattcaactgtttactcgttgtggagaaaaaaaaaaaaaaaaaaacaggccgggcggtggctcatgcctgtaatcccagcactttgggaggccgaggcgggcggatcacgaggtcaggagattgagaccatcctgactaacacggtgaaaccccacctctactaaaaatacaaagaattagctgggcgtggtggcgagcgcctgtagtcccagctactcgggaggctgaggcaagagaatggtgtgaacccaggaggcggagcttgcagtgagccgagatcgcgccactgcactcccgcctgggtgatagagcgagactccgtctcaaaaaaaaaggaaaaacaattcaccctgtccggaagtgcacagagtaaggctgggtgtcctttgcatgggaacgacctctagcagtctgtggctcttgccagattttttatatatatatatatatttctaggtgtgactacccccgactcatccaaccagtgagcctataagtctagtaacaaacgctcccgctccacagtccaaagtctcaacagaatgtgactgtcttgcaccaggtccctgctatatttagtgcctccaagaatgtttggcttttgttttctgttttttttttcttttgagacaaagtctcgctcttgttccccaggctggagtgcaatggcgcgatctcggctcactgcaagctccgcctcccaggttcaagcgattctcctgcctcagcctcccgagtagctgggattacagacacctgtcaccatgcccagctaatttttgtagttttagtagagatggggtttcaccatgttggccaggctagtcttgaactcccgacctcaggtgatccaccctcctcggcctcccaaagtgctgggattaccagtgtgagccaccgcgcctgggctggtgtggtttttttttttttttttggagacagggtcccactctttcacccaggttggagtgcagtggcatgatgtcggcttactgcaacctccccctctcgggctcaaaccattctcccaccacagcctcccaactagctgggaccacaggcgcgcaccacaatggccggcattttttttttattttcggtagagacagggtttctccatgttgcccaggctggtcttgaactcctgagctcaggtaatctgcctgcctcagcctcccaaagtgctgggattgtaagcatgagccacaacgccctgcctagaaataattttagatttagagaaaataaataagcttcaaatttacagaaagtacaaagataacacagagagctcctgtacatccttcaccagtgtcctctaattttatatttcttacaaccaagaaattaacctagctactcaggaggctgaggcgggaggattgcttgagtctaggagttaaagcccagctttggcaacataacctcttctctaaaaataaatgaatgaggccggacatggtggctcacgcctgtaatcccagcactttgggaggcagaggcaggtggatcacctgaggtcaggagttcaagaccagcctggccaacatagcgaaaccccatctctactaaaaatacaaaaaattagccaggtgtggggacatgtgcctgtagtcccagctatttgggaggctgaggcaggagaattgcttaaacctgggaagcggaggctgcagtgagccgagatcgcgccactgtacttcagcctggacaacaaaaggagactccatctcaaaaaataaaaaaaaaaaaatgaatgaatgaaattaaccttggtatactactattaagtgaggcctggcgggatgttgtggctcacactgtaatctcagcactttgggaggccaaggtgggtggatcacttgaggccaggagtttgagaccagcctagacaacatatcaaaaccctgtctctacaaaaaattgagtgtggtggtatacacctgtagtcccagccactcgggaggctgaggtaggagaattgcttgaacctgagaggccaaggttgccatgagctgagatcaagccactgcactccagcttgggcaacagagggggactctgtctcaaaaaaaaaaaaaaaaggaagggaggccaggtacagtggctcacacctgtaatcccagcactttgggaggctagattgcttgagcccaggagttttagaccagcctgggcaatatagtgagacctcgtgtgtagaaaaaaaaaaaaattagcttggcctggtggtgctcacctggagtcccagctcctctggaggctgagacaggaggatcacttgagccctggaggttgaggctgcagtgagtgatgattgcaccattgcacaccagcccgggcaacagagccagaccctgtctcaaaaaaaaaaaaaaaaaaaaaaagccaaagccagaatgtacagatttcttcaatttttcccatatgagactaatttaaaaaaaaattttttttttttatcgagatgggggtcttgctgtctggaagtatacatactgagaaattttatttttcaaacaaaatcaccccttttcctgtcttaggactggacattgcatctagttgtcggatctccttaagcctttttctggtctgggaagcaactcagcccttccttgttttttataaccttggtaagtcatggaatgtccctcaattagggcttatctggaattcttcatggtgagcctggggtgtgagttttggggaagaaggccattggtgaggtgcccctctcttctgtgaatctttttttgtttgtttgttttttgtttttgtttttttgagatggagtcttgctctgtcgcccaggctggagtgcagcggcgcgatctcagctcactgcaagctctgcctcctgggttcacgccattctcctgcctcagcctcccgagtagctgggattacaggctgccaccatgcccggctaatttttgtatttttttttagacggggtttcaccgtgttagccaggatggtctcgatctcctgacctcatgatctgcccgcctctgcctcccagagtgctgggattacaggcgtaagccacctcgtccagccatcttctgtgaatcttatcaggagtataggataccaacaagactgataaattattgacagtgataactgatgatgctgaccttgatctcttggctgaggtaggcttgctaggtttccccactggaaagttactagttttcttcttttcatactctatcctttgggatcatggaaaattttatttttattttatttttggagagtctcgctctgtcatctaggctggagtgcaatggtgtgatattggctcactgcgacctccgcctcccggattcaagcgattctcctgcctcagccgcttgagcagctgagactacaggcgcccaccaccacgcccggctaatttttttttttcaagagatggggtctcgctgtgttgctcaggctagtctcaaactcctagactcatgtaataatcctcttgcctctggctcccaaagtgctgggattacaggcattaaccactgtgcccggccttttctggcactattgaaaagaccatcctttctccctaaagttgcttttgtctggaattagttggccatatttgtgtgggtccaacctgaactgtctgttctgtgacgttgatgtatggctctgtcctttctccaaaaccacatatctttcttctctttttagatagagatgggggctgggcacagtggctgacgcctgtaatcctaacactttggaggcaggtggatcacttgaggtcaggagtttgaaactggcctggccaacatggtgaaactccgtctctactaaaaatacaaaaaaattagctgggcgtggtggtgggtgcctgtaatcccagctaattgggagactgaggcaggagaatcacttgaacacgggaggtggaggttgcagtgagccaagatcgcgctattgcactccagcctgggcaacagagtgagactctgtctcaaaaaaaaaaaaaaagaaaaaaagaaaaaaatagagatggggtctcacaatgttgcctaggctggtttcaaactactgggctggtgatgctcctgcctcagccttccacagtgctggcattatgggcgtgagccaccacgcccactcatttctatattgctgtagctttatagtaagacttgaaatcaggccatgtgagtcctcttttttcttgtttctcaaaattgttttgtctagtctagttcctttgcctccacatatatattttagaatcagcttgttgatttcatagaaaagatcattgtgtattagtacgtggaaagccacggtattagttttttgtttgtttgtttgtttgtttagacaaagtctctctctggcacccaggctggtgtgccaatagtgttgggattacaggcgtgaaccactgtgcccagctggtactggtttttataactgtgtattattccatccactgtcactacttccccaggaccagtacagtttctgcctcctcagtcttgcacctttaaccttgtcctcacccccaggctgttctccctgcagtggacagagggagcctgttaagaatatccttcctagctgggcgccgtggcttacgctgtaatcccagcactttgggaggccgaggtggaaggatctcttgagcccaggagtacgagaccagcctgggcaacataacgagacccccatctctacaaaacatttaaaaattagccaggcatggcagcgcatacttacagtcccagctactcaggaggctgaggtgggaggattgcttgaacccaggaatttgaggctgaagtgagctgtgatcctgtcagtgcactccagccggggagacagagggagaccctatatccttcctctacttggaatcctccctggccctcagttccctcagggtaaaaatgaagtcgtccctgaggctccatgatgttctcatgcaggtgaggcgctgtcctacctcatggctttttcacatgctgcttccactgcctgcactgcccttcccccagataaccctgtggctcatttcatcagcattctaaggcctctgcttaaaagcctccttctcaaaaggctctccccctggccactctgctcaaacgccccaccctgttctctctgtccccttcccctgcttaatttttcttggaaccacttgtcattcctgtcattgttccacctatgcgtttggtttcttgttttctttttttggggtggagtcttgctctgactcccaggctggagtggagtggcgatcttggctcactgcaacctctgcttcccgggttcaagcgattctcctgcctcagcctcccaagtagctgggattacaggcgcacgtcaacatgcccgtatatttttgtatttttagtagagacgaggtttcactatgttggccaggctgatctcgaactgctgacttcaggtgatctgccagccttggcctcccaaagtgctgtgattacaggcatgagccaccgcacccggcctatttgtttgatttctctttctgtctccccccactagaaggggaatgccccatggtagggcggtgcccctggctgtagcgcagtcccttgcatggtgcctggcatgcgataggtaatcggggcacccatctccctctcgggatgcactcattgatgtacttgtcaatcactgagcaagacccactcagcaatgtctgctgagcctgctctgtgccaggctctgacctgaactgccacccttctggagtcaaacaggcctggttgccaccaagaggagttaggcctggcagaggagacaagcattagtctcacaacagaaggaagtaggccggacgtggtggctcatgcttgtaatcccagcactttggaaggccgaggtgggcagatcatctgaggctgggaggtggaggttgcagtgagccaagatcacgccgctgtactccagcttgggtgaaagagcgagactccatctcaaaaaataaataaataaataaataaataaaaaggaagtggagactttcattgagatcagtatcaaagggcacgaggtggcagggcatggtggctcacgcccatagacccagcactttgggaggctgaggtgggaggattgcttgagcccaggagtttgataccagcctgggcaatatagtgagacctcatgtcaacaaaaacagacaaaacaaaaaaaacaggggagggagggctacaggagggtgggatgaggactggccacagttggaggccaggcccttcctggggatcccagcggttgttactctttaagaaggacctggcctggtgtggtggctcacgcctgtgatcccagcactttgggaggttgaggcgggtggatcacttgaggtcaggagttgaagaccatcctggccaacatggcaaaaccccatctctatgaaaaatacaaaaaaaagttagttagctgggcgtggtggtgggtgcctgtaatcccagctacttgggaggctaaggcaggagaagtgcctgaacccaggaggcagaggttgctgtgagctgagatcgcaccgttgcactccagcctgggcaacaagagcaaaactccatcgcaaaaaaaaaaaaaaaaggctgggctcagtgactcacgcctgtaatcccagcactttgggaggccgaggtgggcggatcacgaggtcaggagattgagaccatcctggctaacacggtgaaaccccgtctctactaaaaatacaaaagattagcggggcgtggtagcgggcgcctgtactgtagtcccagctactcaggaggctgaggcaggagaatggcttgaatcctggaggaggagcttgcagtgagccgagatcacgccactgcactccagcctgggcgacagagcgagactccgtctcaaaaataaataaataaataaaagaaggacgtgttcccttgttcttctatggggacatggggaactcctgtactgttttattttcctgaaatatttttattgaaatataattcacataccataatacctaatccttttgaaatatactattcagtggattttagtatattcacagttgtgtaaccagcaccactatctgattttgtagcactttcatttcccctaaacccatacatatgaagcagttcctccctcccccagcacctggaagccactaatgtcctttctgtctgtgaatttgccaattttggatatttcctataaatggaatcttacagtatatggccttttgtgtgtggctttgtttatttagcatcatgttttcaagattcatccatgctggttgggtgcagtggcgcacgcctgtaatcccagcatttgggaggctgaggcgggcagatcacttgagggcaggaattgatgagaccagcctgcccaacatggtgaaaccccttctctactaaaaatacaaaaattagctgggtgtagtggcacatgcctgtaattccagctactctgggtggctgaggcacgagaatctcttgaacctggggggcaaggttgcagtgagccgagatcactccactgcactctagcctgggcaacagagcaagactctctctctctctcaaaaaaaaaaaaaaaaaaaaaaaaaagaattcaccaatgaagccacctgggcctggacttttctttgtgggacgttttttgaatactaattaaatttcttgtacatctattgagtttttctgtgtcttcttgagtcagtttcagtaatttgggtctttctaggaatttgtccatttcatctagggtgtatttaatttgttagaatagtattcccttatcatcttttttatttctgaaaggttggtagtgatgtctcctctttatttctgatttttgtaatttgagtcttatctctttttctcttggttaatctagctaaaggtttgtcagtttggttgatctattcaaagagcaaattgtggtggtgttaacttctctctccatttttttagtctctttatttcttctctaattatttccttcttttctctttggatttggtttaccctccttttctgaggttcttgaagtggaagattattgaaatctgaaagtatttgaaatctttctcttttttttgttttttttttttgagacggagtctcgctctgtcgcccaggctggagtgcagtggcacgatcttggctcactgcaagctccgcctcccaggttcacgccatcctcgtgcctcagcctcctgagtagctgggactacaggcacccaccaccatgcctggctaatttttgtatttttggtggagacggggtttcaccatgttggtgaggctggtctcaaactcctgacctcaggtgatccacccacctcggcctcttaaaagtgtggggattacaggcgtaagccaccgcgcccggccaaaatcttccttctttttaaatacagttgcttacatctatgaatttccctgtaaacctgctttagctgcatccataagttttgatatgttgtgttttcattttcatttatctcagcatatcttctcatttctcttatgatttcttctttgatacataggttatttagcagtatgttcatttctatatatttgagaatttctgaaaaacatctttcttgtgttcatttctaacttcatttcactgtggttggaggaactactttgtatgatttcaatctctttaaaattattgagtcatgttttatggcttggcctcgaatacggtgtgtcctggagaatgttccatatgcacatgataagaatgtgtattttactcttgggtggagtgttctgtacacatctgtcaggtcttattggtttcgtattttctatttccttgttatcttttatttggttgttccatccattattattatttttcttgcctgataccaatgctgatatccatccatgattgaaagtggggtattgaagtctccaactttctttctttcttttttcttttctttttggagacacggtcttgctctgtctcccaggctggaaacgtggtggcatgatcatagctcactgtagcttctgtctcctgggctcacatgatcctcccacctctgcctcccgagtagctgggaccacaggcgtgtgccacacccgactaatttttgtattttttctagaggtagggtcttgctatattgaccaggctggccttgaactcttgggctcaagtgatcctctcatcttggcctcccaaagtgctgagattacaggcatgagccactgtgctcagccccaaattggccaatatttctttcttttttttttttttttgagacagagtcttgctctgtcgcccaggctggagtgcagtggcgcgatcttggctcactgcaagctccgcctcccgggttcacgccattctcctgcctcagcctcccaagtagctgggagtacaggtgtccgccaccatgcccggctaattttttttgtatttttagtagagacggggtttcaccgtgttagccaggatggtctctatctcctgaccttgtgatccacccgcctctgcctcccaaagtgctgggattacaggcgtgagccaccacgcctggccaatatttcttttgttctgtgctttttccttcctccctcccttcctctttaccttcctctttaccttcctctttccctccctcccttctttccttccttccttcctttttgttcttgttcttttctttttcctctacccttctttcttttccttctttctttttttctttctttgtttttgcttgattgcagcatcatgagagagtcctgtgcttttttatagctgcaagtattcctgggtcgagcctactcccactaacactgatcactctcccccttgaatttttaggttatttctagtttttcccctcctgccagagacttgggggtccgcaggcttgtgtgtctgctatgctcagggtggataccctgcaagggagtgccatgttgcatcagaagtggatttagagtgatgttgccaggcccaccaggaaaggctgtgccaaggctctttgctggggtgccaagaagaagggtctgtgcctgttgtggtgccaggcattgacatccttcactcccacccccgtcaccctcatgaactagtgaactagtcctgtggaatagggccttatgcgtgctagaccctgggtttgtcctgctgacaaccccatagtgtaggtgctgttatcccaatttcatagagaaactgagggctggggaagtggcagccttcattcagttcctgccgtgaggctgtggctgagctgccaggctgcagagtcttcacccaatgatcttgctcagttgtccccatgaggaagctgagcctggccttcctgtctctggagtccaaggtttcctttccttgtgtgcccctggaagtgctgtgtggtgaccgggatggtgcctggcagatggagattagacgcaggttggattggtgcctcattggtcaggagggctgctcttagctgtgtgccaatagaccggatgacttaatctctctatccttggtttccccatctgcaaaacagggttggccagagccctgtgaaggtggaagaaggccctgtgtgcctggagctttgtgcagtgccctggagatgctagcttgtttttctttcttttttttttttttttttgagacagagtctccctctgtcatgcaggttgtggtgcagtggctcagtctccgctgactgcagcctcaacctcctgggctcaagtgatcctcccacctcagcctctcaagtagctgggaccacaggcgtgtgccaccacgcccggctaattttttgtagaggcgaggtttcatcatgttgcccaggctggtcttgaactcctgagctcaggtgttccgcctgccatggcctcccaaaatactaggattacaggtgtgagccaccacgcccggccgtgatgccagcttcttttgccgtgcagctagcatttgctgaacacctgctgtgtgccagatagtgtgctggaggcagggcagtgaacaagacagacgagatccctgtcctgtggagctgatgctctagctgggggcctgaggggtgggaaggaagcacaggtgctcgggtgagaaaaaacatcatgcggccaggcatggtggctcacacctgtaatcccagatctttgggaggctgaggcaggcggatcatctgaggtcatgagttcgagaccagccttgcaaaaccccgtctctactaaaaatacaaaaattagccaggtgtggctgggtgtggtggctcacacctgtaatcccagcactttgggaggcggaggcaggtggatcacaaggtcaggagatcgagaccatcctggctaatatggtaaaactccgtctctactaaaaatacaaaaaattagccgggtgtggtggcgggtgcttgtagtcccagctactcaggaggctgaggcaggaggatggcatgaacccgggaggcggagcttgcagtgagccgagattgcgccactgcactccagcctgggtgacaaagcgagactctgtctcaaaaaaaaaaaaaaaaaaaaaaaaaaaattagccgtgtgtggtggcgtgcgcctgtagtcccagctacttgggaggctgaggcagcagaattgcttgaactcgggaggcaaggttgcagtgagccaagatcacgccattgcactccagccagggcagcagagcgagactgtttccagaaaaaaaaaaaaaatacaaaaattagccagacgtggtagcatacgcccgtagtcccagctgcttaggaggctgaggcaggaaaatcacttgagcccaggaggcggaggttgcaatgagccaagatcctgccactacacttcggctggggtgacagagccagactccatctaaaaaaaaaaaaaattctttaaaaatcaggcacacagtgtgatctgacttgcagttttccaagcctgtggggcagggagcctgggggaggctttgccctgagatgggagacttggcctcaggacattagagcgaaacagaggaggaggggatgggtctggatatccaaggcaggatctgccgagagatacgctgtgggggtgggacaaagacctcaagaacgggtccgggctgttcctgtcacttgtgacattgtggactgagtctgcctggatatttccttatgggctggctccccatcaccccgggagagtctcggggtggagggaactagaacgtgtttgcctggaggtcactacctactcccctggaaggaaggggctccaggaggctggctgtggaatgcagactgtgggtggtgcccggctgcctgcctctagttcacttgggccctcagggtggtacagagctggaaatccatacatggctgaccaccctgtaagggctgcagacacagtgagcgttcactttgccctggcaactggaactgtctcctccagtcctcaccacaaccgttttacagagcaggacacctgttgcaagatgggagagactttgctaacaaggtcccacagctggcactcaccaggctggctggggtactcaggccaccccttgcagtggggagcagttaggatgacaccgaggacacccctaggagggcggagttgtgagctccaggaccccacatttgagcagtttccccgtcactcttgaaaatgctgctgggccggccagtttctttggggtttctcagtactgctgaaagttacaaggtcaacactggcctgcaatcacagttataaaaaagttataaaagcctgacattcaaatcacgttggagactataaaacagcaagtttttcatttgcacacctcacatgacctcaagcctgctgtccatacacaggaaatggggatgtgcggaaaaaaaacccgaagtggaggacatcatcccccacgcataatccagtccgtgcatcgcacttgaccttcggcactgcagcctgcattgctccccggactagctcccaagattgatttagccagttccctgccagtggacatttaggtcattatcggttttcattccacaaagtactgccctcagggagtcggctgtccttgccaaaccactgcattaatatgtttctgggtgctggggaaagggcgcttaagacccctgccctcaaggtgttgatattctagttgggactgttagataaatgagcaattaggctgggcacgcttgaaatcccagggctttgggaggctgaggtgggaggatcgcctaggcagcatatcactacagaaaaacacaaataaaaaaagttagctgggcgtggtggcaagtgcctgtagtccgagctactcaggaggctgagggaggaggatcgcttcagcccaggagtttgaggctgcagtcagctatgattgcatcactgcactccagcctggatgacagagtgagatcctgtctctgaaaaaagaggtgcaaataaaccagaaaagtaccaactagtgggcagtgctgtgtttagaaggaaaacagggcaacatgaaggggaggtgggcatcagtaggggacagacctctctgaggaggtgacatctgagttgagtccctggtaaccggagatagccaggattgtggaaatacttggaggagatgagatggtctttcgaagcaggaggccagcatgtgcaaaggccctgcgacagcaatgtctggcctccttgctgtttctttttatttcattttttgagacggagtctcactctgacctatgctggagtgcagtggcatgatcttggctcactgcaacctctgcctcccaggttcaagcgattctcgtgcctcagcctcctgagcagctaggagtacaggcacacgccaccacaccccactaatttttctgtatttttagtagagacaaggtttcaccatgttggccaggctgctctcgaactctggacctcaggtgatccacccacctcggccttccaaagtgctggcattacaggtgtgagctaccacgcccggcctttttgctgtttcttgaccaccaatgtggctggaggcagggagtgagggggtggtgggggaggagggcacggaggtgacagggccatggggggcacttgggaactgtcaaaccgtcaaatgttatgagcagaggagggtcatgttcttacattgtatcgagttttcctttttgtttttttgagatggagtttcactcttattgcccaggcaggagtgtaatggtgtgatcttggctgactgtaacctctgcctcccaggttcaagcgattctcccacctcagcctcccgagtagctgagattacaggcatgcaccacacctggctaattttgtatttttagtagagacggggtttctccctgttggtcaggctggtctcgaactcccaacctcaggtgatctacctgcctcggtctcccaaagtgccgggattacaggtgtgagcaaccgtgccggctttttttttgttttttgttttttttttttttgagacagtctcactctgttgcccaggctggagtgcaatggcatgatctcacaatctcagctcactgtgacctctgcctcctgggttcaagcggttttcctgcctcagcctctcgagtagctgggattacaggtgcccaccaccacgcctggctaatttttgtatttttagtagagacggagtttctccatgttggccaagctggtctcaaactcctgacctcgggtgatctgcccgcctcggccccgcaaagtgctgagattacaggcatgagccaccgcactcaaccaattttttttttttttttagtagtagagacagggtctcatcatgttgcccaggctggtttcaaactcctgggctcaagagattgcgtgccaaggtgctgggattataggcacgaaccactgtgctcagcctgagttttactttgattcgatggggcgaatgttctcttttgggtatcatggtaagagtttcacaaacccttccacctcctctctgaggcaggtggcatcattcccacataacagattgggaaactgaggcacaaagaggttacctgacctgcccatcttgtccagaaaggaaatactggattccagccagggcctggagagtcccagagccacgatcacgaattgccacaggtcacctcctgcttttgctcccagcctgttgtgtcccttggatgagaccagggagcaggtgatgccacggcttgagtgccaagggcgggcctcgagccgggagctgcaggattcctgatcagggaggggctgctgggctgggaatgttggggaggagtgaggccaggagtggattgtggaagtgagaagtctcctcatctgtaaaatggcagatttggcccattgttctgcaagcattggtcatctgcctcctgcctgggtgtgtgttgggtactggggagagagcagagaaggggccgatacgggaccctgcgcccatgaggctgccactctaataggatgttgaggtgggggcagggacagactgcagctgggtgaacacatcaggaacccggaagatgccagttgtgagtggcactgagcattgagcgggttgatgtgtgaaagaaggggagcagcttcctatggcggggggagggagggtgcagtttgctgggagctgcccgcctgctctgttaatgctgcaggaagaaggttccaggctgagggaacagcctgggcaaaggccctggggcaggacagtgtctggtgtgtttcgggaacatggaggaggcatatgtggctggagtaaagccagcaagacagagagtagggggaggtgaggacaggaaggtgacaggacaggtcgtgcagggcttggggggctgcagggaaaagtctggcttttattccaagtgaagcgggagcccaaggagggcccataacaaaggggtttacagtgacatggtgtgcacaggcaccttgtggctgctttgtgggaggcagattgtggggaccaagggcacgactgcactggtgtaggcaggtgacagtgggacacgctgacagccttggacgtggagggaattgagcagaatcaggcctgatgtggaggtgaaaccagcaggactcgcggctggacaaggcgggtgggtgagggccaggggagccccaggtctgcagcctcgtgaggggtttctcccctccctgccctttggggtgaccacagggatgcagtggcacctacctgcggacactgtgtgggccgagcactgtaaggcttgggcgtccttgctgggtgaccaatggctattgttggaaggatgaggcagggaccgaggtgggcagaggagactgggcatgggtccccacttctgctccaacagagcgacagagaagcccctgaggtgggtgcgggtgactgcgggtctgcctcattggtgtcccacccacattcgtgtcctggctctgctcctccctcgctgagcgtcctgggcaagtcctgagactgaacctcagtccacctgtctgaaatgggacttttggccctggcatccttgtgactttcaacccctctggggttgtcagaggatttgccgctatgttgcccgagatggggttagagacagcctgttgggtggccagcgttccttgtgtggctcttatcagagtcctgagagaagaggccagggtggaaattggccctggagtgtgggctcctgccgaagcctcttcctgtggccagtgccatgctgaaggctggctgtggtgtcacgtgagccctcccagccacattcaggctcaaagagactgtgctgagcatatggtgacaaggaagggatcccagcccagggtcctggccaggccctgccagcaccaggctgcacaggtgaggggtggcttgccctggggtgctggctctgggccacactgctgactcaccctctgtgggcttatctgttgattctccctcccatgggaaggctctgggtttgagcctgcatcgttcctgcacgtagccgtccccaccctcataggggctggaagtcaaaaggcgcctggtggagccttgtggtctgttcaaaaaacggtaaataaacagcctgggcttctgatctgctggactcaacctggcacctctcccatcgctgctgggtgctgcctcccagctgcacccttccctgcctgtcccctaccgccttcctggagcgcttatccccttccagggagaggtggcccactttagagctctgaaacctgctctggtggggtgaagtgacttgagccaggccaagccggtggctgggccctctgtggcagactggaagtgtcctcccatttcatggatggccaagtcagtgcccagagaggggtagagacctgtccagggccacacagcccaggaggggcggagctcgactttgaacccaggctgcctggctccacagtctggattcttcttacccattcaacaaatacttaatgagcacacactgtctggcaggcactgttctaggtgctgaggatctagcagtgaccaggccaggtgcagaagtcttggcgtgtcacaggactagaccttcatcagaggccgttttgctgggagtgggaaggggtgtgtatttgggagggaggggcgcaagccatcacacctgcccatggccaggtaggcagggcctatgggagggtttcctggcagagggaacaccccctgcaaaggcctgaaggccagcagtgccagagagaactcagaggaggcaggtgcagggggtggggctggggaacccggtcagcactgggactaggactggacaggacgggctaggaccagtcacttggtttctgcaagagagaagcttggaggcaggatcttcattttagaaaggtcactggggaaggtgggaggttgggccaggaccctggggcctggcctgggcccatggataggaggccaggtactgaaatgatgcaatagtactaggctaggtgcagtggctcacacctgtaatcccggtgctttgggaggccgatgcgggaagattgcatgaggccagaagtttgagaccagcctgggcaacatagcgagaccctgtctctgcaaaaaataaaaaaattagccgggcatggtggtgtgtgcctgcagtcccagttacttgggaggctgaggtgggaagttcactagggtccgggagttcaaggctgcagtgaggtatgattgtgccactgcactccagactgggcaatataggaagatgccatctctaaaaaaaaaaaattagccaagcatggtgacatatacctgtagtcatagctactcaggaggccgagactgaggtttgcctgtaccctggagtttgaggctgcagtaagctgtgattgtgctgctgatgcagcctgggcacagagtgagatcctgcctctaaaataaataaggccgggcgcggtggctcatgcctgtaatcccagcactttgggctgctgaggcaggtggatcacctgaggccaggagttcgagaccagcctggccaaaatggcaaaaccccatctctactaaaaatacaaagaaattagccgggtgtggtgctgggcgcctgtaatcccagctacttggggggctgaggcaggagtaagctgagattgcgccactacactccagcctgggtgacaaagcaagactccatctcaaaaaaaaaaaaagttaataaactacttaattgtgcatctcctgtgtgccagccctactctatgctttggggatggaatgttggaggatcccaccttggggagctgtgtgtgagctccccacacagctcagatgggggtatggggtctgtatgtgagccagaacaaaatgcagctaagtgacatttagcatgtgttagttccacagagaaaaatgaggcatggggggtggaggtgggagaggtgtgaatgggggtgagagaagtctctgaggaaatgtcattcgagcggaatcactctgagcttggcaaggttaccctgtcttactgacgggaaacctagaccagagaggccaggaagcccgcccaggatcacacagcacagaggtggccaagcagggactggaatgcagggcagcctgggtgcacagagggcactgtagcagcagcaaagggagaggagaggagtaggtagatttcagtactctcagaatgcggatgggatcaacgaggaggaagtagatgacggaggctggaaagtcacttcctgctaagtggccagtgtcagtgttccaggcagagctgcttgggaggtggtttctggaaggctccaagtactcctgctgctgtgtcccagaaaacccttagggccaggcccctgctcaccaagctcctaggagacttctggggggctcatttcggaggcagtccaggccgagggtgaatgttggtgccctttgcatgcagcagtctgggaacttttagaagcaaaatcggataagtcccagggctcctggcgctctcagcctggcatgcgaggccctctgcgcctgccctgccctgtcctcaaactctcccctgagagctgcgtctccgtcgcccaggctgtgccctcctgtgcccgacttagaactgttcggaataacactcaaaattttaaggaaattaaacactcgaacaaaggatttttagcaaagcaattttacttctgtacagaggggtgcttgtccttggccagtcgccatgagagcacacctgaacaaagggacacgagagcctttattcctgatgcaagtcctgctcctgtaccctctccccattggccggggtcgggtcatacaatctaaaccaattttggttggctaaacatttgaatttttgtagataaggtgggcacgtaaaagagagaggaaaggggaagggatgtctgtagtgaactagaaagttagtcttctttgtaaataagggaaggaatgtgagctggtactggtaacgcctggtactgtggcgtgcctgggcatctaacaaagccagaaaggaaaaaggaaaaaagagtgtgtatgtgtgtgtggggtactatgaattaaaagattgatcagcctgtttgaagagaaacctcatcatattccacactacaaataccccaggcccagaaagtcaccttctcctgcctgtgcccacagctctgtgttctcttgggcgtcactcccgccctatgttctgaagctgtgattgtccgttgtctgagctgggcgctggtggcgtctggggcatcaccattgtcctcacagtgcctggcgcctcagacacaaagtggagtcacaggacagcacaggccacaggcaaacaccagaggtccaaagccgggccctggctgggagttactggagggtctgcctaagatgtgtttgctcagaaggccaggtgccctggtggttagacagctcaggccctgtgccttcagtccatgttcatgccacccccagatgctgtgtgaccctgggcaggcccccaccctctgggcctcatttgcatctgtaaaatggagccagcagacccattttaatggatcctgtcatggttaaatgggttaataggcaggtgcagtggggtcattgcagggagttcaagaccagcctggacaccatagtgagaccttgcctctacaagaaacttaaggtggcctggtgtggtggctcacgcctgtaatcccagcactttggactccattgcactccagcctgggtgacacagtgagactctgtctgttaaagaaacaaacaaacaaaaaaaccaaaaaacttaaggtggtggtgggtacctgtgatcccagctacttgggaggctgagacgggaggatcacttgagccctacagttggaggttgtagtgagctgtgaccttaccactgcactccagccagggcagcagagtgagaccctgtctctatttaaaaagaaatcaaaaaggttaataatcatgaaaagttctcaatgccttgcttggcatagagtcagtgttgaatagctattagctactctaatgttttgaactcagtaatgcgtgtgtatgatgcggaattcaaagatgtcggaaaacatgcagtggctccttccccaccaggccccagccgccccgggtcctgttttgtttccctttggttgtcttagtcacaaagtacagactttcttctgtaccttttccttccccttcccccctcccccttcccttcccccccccacttccctttccccttcccccttccctttcccttttccttctcttcttcctttccttttctttcttcagtaaaactgatcactacaaaccttttctttttttctcacttagtacaccaaaaagggagttacatgtctagaaaggacaggctctttttgtgtgtctgttgctgcatagcagcatggataggccataatttatatataaatacacgtattttattctattttaaaggtttttgttttgtttttttcccccgagacggagtttcgctctttgttgtgcaagctggtgcaatggcgcgatctcagctcattccaacctctgcctcctgggttcaagcgattctcctgtctcagcctcctgagtagctggcattaaaggcacccaccaccacgcctggctaatttttgtaattttagtagagatggggttgcaccatgttggccaagcaggtctcgaactcctgacctcaaacgatccacccacctcggcctctgaaagtgtttggattacaggcgtgagccattatgcccagcaatatatcttatatataaggtgattgaaaatatatgttttcaaaaagaaaacatattttcagtcagcttccttaggttgaacgtaatttatatttaactagtcccctgttgctgggctttaaaattctttgagatctgaatttttcgtcttattgagaaactaacagggttgtaacaattctgtgggcaaattttaatggaatgtccaccctgtacttttgtatctgaatcttcacgaacatgttctccttgacttgtgaccttttcctgagatttcagttagatatagttaatcgcttaagtctttttttttttttttgagacggagtctcactctgttgccaggctggagtgcagtggcgctatctcagctcactgcagcctccgcctcccaggttcaagcgattctgcctcagcctcctgagtagctgggactacaggcaccctccacctcgcctggctaattttttgtattttagtagagacggggttttaccgtgttggccaggatggtcttgatctgctgacctcataatctgcccgcctcagcctcccaaagtgctgggattataggcgtgacccactacaactggccaatcgcataaatcttaaacatataccttgattttcttgtcttcttcttcttcttttttggagacagtctccctctgttgcccaggctggagtgcaacggcgcaatcatggctcactgcagcctcagtctcctgggctcaagtaatcctcctgccacagcctcccgagtagctgacactacaggggaatgccaccatccgcagtgaattactttttactttttgtagagacaggggctcgttatgttgcccaggctggtctcgaactcctgacttcaagtgatccacccaccttggcctcccaaagtgctgggattacaggtgtgagccactgctgcaagttttgattttctaataaatgattgtaccttggtacctactggctagatcaagatgcaggacttcttcatggtctcagaaagtccctcctgccccttctagtccatttcccgaaagggaaccactgccctgatttctatctccagagactagctttgccggttcaagttcaagtccaccctgtgactcagcaagagaaacaaggacatgtgtctacaaaaagcgcatatgagaatgttcagaacagctttatttgtaataaattcaagctaggaagaccccaaatgtccatccaatggtgactagacgaacagactgtagtccatcagtgcaatggacagattcgaccacgaaaaggaatgaacgtcagacacacgaagcagacaggatgtctgtgattgcatcacatgctgctcctgtgttgttttatcgttgacatcttccacttgcacacttcaaaaatagtcattgaaaggatggagcaggggcactgttgtgaggggcacgtgctgtcaccgccgctgctggtgattcagtgtctagccagcgccgcatggtttctgagatgctgcatttgtcttttttttttttttgagacagagtcgttctgtcacccaggctggagtgcagtggcgcgatctcagctcactgcaacctctgccttccaagttcaagcggttctcctgcctcagcctcccaagtggttgcgattacaggtgtccaccaccacacccggccagggtttttttttgtctttttttttttgtattttgtattgtttttgtttttgttttgagatggagtctcactctgtcacccaggctggagtgcagtgatgcgatctcggctcactacaatctccgcctcccgggttcaagccattctcgtgtcttagcctcccgagtggctgggattacatgcttgcgcccccacacccggttaatttttgtatcttaagtaaaggcggggtttcaccatgttggccaggctggtctcaaactcctgacctcaggtgacccacccaccttggcttcccaaagtgctgggattataggcgtgagccactgtgcctgacctgagacactgcgtctctgatgtgcaagatgccaagtgtccctgcccctcaggtccctacctgtgagctaggtggcctggggctctggtagggccagggccaaggctacttgtggcgttcatgaggttaataccctgggacagcctggtgtccactgtgactactgtgacggaaagacaaggggccatgctaagaggtgactttggggtctgtcacctgcatgggggcgcccgctcgctgtttccctcgttcagttcactccgcctcccaattgatgtagcttgttccctcagtccccctgctcagagaaccctctccaattatcccagcccccaacccctctcacccctgcagtatgtcttcctcgcacccacccccgtcagaatgttggcgccagtgtcaccagcacctccccaagtgctcaggagccagtgagaaaggttcgctccttttcatgcaagccatgagctgtgatgttgtccaagtctcgtatcctgtttgtgcctcaggctcctcatcagccgaatgggaggctgacggaaagggattagagctcaggcatcagcttgaactggggcacgtggcgtgacaggcctagtgcctggcaggcaggtccctcgggctctttgtcatcctcaggagtgtggctcgaagacaggtagcatcccaggcctggagagctgactgtgctgcctgtggctgcagagacaggatgcagaggccagggctcgtcccccagagccttgcaagtgtctgtagggcgctcccctctgtcttgcctcctcccactctctggctcttctctatccggcctgccctcaggttgtgaccatccacctcccaaactgccctggaatctgcctacggcctgtccactggcctccgtacccctgcctgccatctctctggtttcgcccctgatgtcactcacatgaaccacagcggtcacccccacctgcctcctgctcctgccctctcctctgccctgcatcagccagaggggggtttaaaagcttacatttgttaataatctggctaaagcttaacatttattgtaatccatccctaaatcccagctggtggcattgctctaacagtgatgaccagcctcctcatcataatccccagcactgccaccctcaaccccccagcgctgaccactggaggctgcttctaaaacttcagccctgctctgccagcagcgcccctggggggtcttcgtagccctgttgcccatcacgatcccttttctcatgcagtccaggctgcaagcccccgccgagggcttgggctgacttgttgtgtagtcagtgctgtgtctctgcacccagccagaagtggtgggacagccccccggctgacgggctagaacccatcatccagggtgtgtggaaagagcacatctcccccccgacgccagccactgggtaatacattcccaggaatttccagtgcccagccccagctgagaaacaggtcttctggaaccctccagcaccctcatcaggggttcccagcatgggtagggccacctgccagctgggaatgattgtagtgctagtgacactcactcagggacccaggatgctgtctcgttctgtacagggcacagctgtacagtaccaattgccctgtgtcctgtacaaattttcaacgatccaaacatctaggtgcaaaacctgtttgaaattctctgtgttggccaggcacggtggctcacacctgtaaacccagcactttgggaggccaaggcgggcagatcacctgaggttgagttcgagaccactctggccaacatagtgaaaccctgtctctactaaaaatacaaaaaaattagccaggcatggtagcgcgtgcatgtaatcccagctactcaggaggctgaggcaggagaatcgcttgaacccgaggcagaggttgcagtgagttgagatcgagccactgcactccagcctgggcaacaagagcgaagctctgtctcaaaaaaaaaaaaaaaaaaaaaagaaaaagaaattccctgtgcctagaacctttcaccattttgtatgaaacaacagaatttcctttcgagcctttaatgtaccccgagcccactgtttctacttcagtcctcactggaaagctttcattttcctttctgagtgtacagggtgacttcctgtcttcctccttgctggaatcctggtgtattcactgtaagtcggagcaggctactccctctatcttctggggtggttgtgcctgagtcttttccattgtgaaagacatggaattgattcctttcttccttccctccttccttccctccttccttccctccctccttccttccctccctccttccctccctccttccttccctccctccttccttccctccttccttccctccctccttccttccctccctccttccctccctccttccttccctccttccttccctccttccttccctccctccttccctccctccctccttccttccctccctccttccttccctccctccttccttccctccctccttccttccttcctccctttcctccctttcctcccttccctcccctccctcccttccctcccttcccttctttccttgatggagtcttgctctgtcgcccaggctggagtgcagtggcacgatctcagctcactgcaacctccgcctcctgggttcaagcgattctcctgcctcagcctcctgagtagctgggattacaggcgtgtgccaccacacttggataatttttgtatttttagtagagacggggtttcgccatgttggccaggctggtctcaaactcctgacctcaagtgatccgcccacctcggcctccccaaagtgctgaggttacaggcctgtgccactgcacccggccaggatatgtacttttcttaaacagctctgtcgaatagtaatttacattccgcgaaatcgatccatttcagaattagtggtctttagtcattttacagtccttttttttttcccacacagagtctcgctctattgcctaagctggagtgcagtagtgcagtcatggctctgtacaacctcagcctcccgggctcatgccatcctcctctctcagcctctctagtagctgggatcacaggcgtgggccaccacgcccagctaattttagtttagtttagtttagtttagtttttgtagagatggggtcttactatcttgtccaggcttttacagttaattttagtaaacatcaccatagtccagatgtagaacattttcatcaccccagaaagctccttcccctccattggcagtcacccccgttcccacatccaggtatccactgatctgccttctgcttctgtagatgtgacttttctggacatgaaacacatcctattttgtcatcaataactttcctcgtattttacccatatacatgtggcattgtgttgatttaaaacacataggaaatgtgttgatctcctgggtatgggggaaatttaacaaatacatgccagggaatgggccccctgggagtacggggggtggggcacagcctgccagagggaaatggttctggtcactatgaccttccatgcataccttcctgagctcttcaggcctcaggaccctccaagaccagagcattccccagggcccagctggggttggtgcctttgctgaggtcgcccaaattgcaagacagagttgctccaccacatgtggtcacacttcctgcccctcgatccggacgcaagagtaatttctgtccctctccccccctcacagggacttccttccccgcggttcaggaatcgtcacccggcggcctctcattctgcagctcatcttctcaaaaacaggtaaaatggggcggcctgaggttcagcaggaagtggatgtggatgtgtggttgccaggagttgctgggggcggagggtggaacttgggtcctgggctgtcattggacattgaattcacgtgttccacatgtgtgaggaaattgaaaaacggctcagtgaacacttacacacccacactgcaagccctcagctgtgaccagaatgccaggtgccatgtgtgctttcttttttcttttttttgagacagagtctcactctgtcacccaggctggagtacagtgatgctatcttggctcactgcaacctccacctcccaggttccagcgattctcctgcctcagcctcccaagtagctgggattacaggtgtgaccctccatggccagctttttttttttttttgtatttttagtagagacagggtttcaccctgttggccaggctggtcttgaactcctgacctcaagtgaccctctcacttcggcctccctaagtgctgggattacgggcatgagccaccacaccggccccatgtgtgcttttcatgtgttatagataacccgattttgctgaacgctttcaaagtcagtagcagacgtggtgacacatccatccttcacgccccagtgcacctccccatgcaataaagacgcctgtctacaaagtcccagcaccatgccccagagaacgagtcattcccgcatgtcatccacgtcccagtttctactcagcatgtcgccagttgtcccccagatatctggctggttttatagctgctctgctcaatccaatgctatactcttttgtaatctcttcttctcttttcattaaagcagcctccccataatcactttttttattttttttaagagacagggtctcactctgttccccaggccgtgcagtggtgtagtcatagctcactgcggcctcgacctcctgggcccaagcaatcctctccaatcagcctctcgggtagctaggattacaggtgcacacaccaccacacccagctgatttttttttttttttttggtagagatgggggttatgttacccaggcaggtcttgaagtcctggcctcaagcaatcctcctgcgtcagcttcccacagtgctgggattataggcatgaaccatcacaccagccctctaccattgctttttattttttattttatttatttatttattttttgagacaaagtcttgctctgtcgccaggctggaatgcagtggcgtgatctcggctcactgcaacatccgcctcctgggttcaagcgattctccttcctcagcctcctgagttgctgggactacaggtgtgtgtcaccatgtctggctaatttttgtatttttagtagagatgggatttcaccatgttggccaggctggtcttgatctcttgacctcgtgatccgcccacttcggcctcccaaagtgttgggattacaggcgtgagccaccgcgcccggccaccattgctttttaatcagactttgactcttagggagacccagcctgttgaatatagtatggcctatgtgtggattttttcctgttctttccttccctgatctcagtgtatttctattcttcccacccgaggctgacatgaggtgggcgtatatcccagctggaaaccccctcgggcctccttgggaaggatcttgggtcagaagctagacccgggagaggtaagggtctccgtgccccttccctgctaatctgcaacatcagctctgggcgttcaacactcagtttgtgttaatgtcttcttgcggcccttttaaatactctcacactgggaaggcagctgacacacacacccccattctacagatggggaaactgaggcttagccatgctgcctgcctttccaatgggccccagatctgggacctgcatccaggcagatctgacctcaacgccagctctcagcttggcctcccaagactcctcactttcgtcctctggccccgcccaacctggcaagaaggcgtgtctccagtgagagacagcagccgatgggcccaccacctcttctttatgagctctgctatttcgtacgccaccgatgggccaatgggctgccacctctgggttcaggcgtccaatcagctgtgccaggaatgggcagccccaaagtcctgagagtcactatagaaatcagtgttggtagttttctgtttctcattgagcaggatggggacagatgtgcaaactgcatttttattttattttattttgagacggagtctcactctgccacccaagctggagtacagtggcgggtgatcttggctcactgccacctccgccttccaagttcaagcaattctcatgcctcagcctcctgagcatctacaggcatgagctaccacgcccggctaattttttgtgtttttagtagagacagagcttcaccatgttggccaggctggtctggaactcctgagctcaaatgatctgcccgcctctgcctcccaaagtgctgggattacaggcgtgagccactgggcccggccacaaactgcatttttaatgagtccctggtgatgctgccagtctctggccacaccactgggagagcctgccctgcttggtttaggcttggagcggagactgcccaggttcccaacccagctcctagggagggaccaccactgtgtttcctgtctggacagtgatgacaataacaccaccttgttagccttaaagcacacgttatttactacatgtcagggaggaggggagagaagcaggcagagagccttggccaggagggagcacagagcgcaggcctacccagtacctgacccggatgaacgatgatgggttcctgatgtctgtccccaccttacagaggagggagccaaggcttcctgaccacttgccttagggcacatgggaacattgtctttaaagcccacccttaagccacctcttgggggaatgtggccttaggccaaggtgtgacttgaccagatcctgtggctgttggtggaaaagggaccacaggggccagtgctgaggccagtgccctggaggaggcaggagtaggtgctggaaggggtgggggcaggtgggggatgggtgtggcagctgtggtggaggtggatgcatagttgcatcctgttgggctggttgaaaagggagttccagaagtgtcccacatgggtggggccttttcctgcctcccagcttgcacccctcagccccgcctgatcatggcattttcagtctctgtctccttttttgttttgttttgttttgttttgtttgagacaaggttctgctctgtggcccaggctagggtgcagtggcacgatctcggctcactgcaacctccacctcccaggttcaagcaattcttctgcctcagcctcccaaatagctgggactataggcgcacaccacctagcctggctaatttttgtatttttagtagagacggggttttaccatattggccaggctggtcttgaactcctggcctcaagtgatctgcccaccttggcctcccaaagggctgagattgcaggtatgagctaccgcgcctggcaaatttttaaattgagatgaagtcttgctatattgaccaggctggtcttgaactcctgggctcaagcaatcctcccatctcagcttcccaaaatgctgggatgacaggggtgagcccctgcgcccgaccaggctccaatctcttattgctccaagtaggtgcccacttggtgctgggccttagctgatctccagggaggcagcgtgagcacctggcatggtcccagcccccgagcccagcctgtgagtgtctgttggattcaccttggggttgggggcccagagagaacattctaggtagggaaacagcattagcaaagcagtgtggggaggtggtgaggcttgggaggggccagaaggcaggagggactgggactggaaggcatgttgaggattcaggcagtgggagctggggtggcatgcatggtggcgggagaccactggctgccatgttcaggagggacagtcagggaccagaatgcaagcggggagtgggggatagggagtggcagagaggctggcatggcgccaggcaagaggcaatgggggcctggccctggtggtgcgggcagatgccaggcagtctagactgtcttccaggcaaggcattaagcagcataggcacccttgctgggggaggtgggtgggaggtaggacgccttactaagaggagaggaaaatgaacacattgcgggcatcagtgattgctggggccggcggggccttgtggggtatacaccagaccacgtggctcctagggattggcagctggctctctgtgaccaaactcagaaccaggctgccaccctttactggcccgggacttgttaaagtgacttccctctctgtgccttggtagcttcatctgtaaaatgggggtgatggtggcgctgccatcgtggccatggcaccccattggctgtggtatgctgtctcttcctgtggggtctgatgtccaaagacagggcccccagggcgcagcccacgttcccctctggttcccgcagcttgccctcattccagccatccccagtgaaccataacttccagccatagaagtttaaacattacctaagaccataaccaccaggaagtttggtggcccatgagtgaaccctgccctcactgggaagcagccccgtaaactctgagtgcctgggactgttcctgtgtggaatgtgcacagtgaggccctgtgaaccacccctccccaccgcccttggccttgaactggcctttggtgtgctcaccggaaccaaggaagagatgtcaggacctggctccagggcttcccattggcctcagaatcaaatcgagcctccttctcaaggccttgtggcccttgccagtctctgggacctcacctcctcctggtccccagccactgcccccatccatctccctcctgattctcaggcccagcttgctggttcccactgcttggcctctgtgctcactgtgctgcctgcctggaacgccctgttccctacctgccactgtctgctgctcacccgcacctggtcacttgccgccttcgttccccggtccccggcagcacgagttatcctgttcttgttttttctttttcttttttttttttttttgagatggagtctcgctgtcgcccaggctggagtgcagtggcgccatctcagctcactgcaagctccgcctcccgggttcacaccatgctcctgtctcagcctccggcgtagctgggactacaggcgcccgccacctcgcccggctaatttttttgtatgcttagtagagacggggtttcaccgtgttagccaggatggtctcgatctcctgacctcgtgatccgcccacctcggcctcccaaagtgctgggattacaggcgtgagccaccacgcccggcctgttttttcttaatggactctctctgcgccagcacacgagaacaggcatgcagatcggctctgcccagcacagggcctggcgccgagcaggtgctccgcatgcacggccgagtgaacgagctcaaagggctggtgctgtgccccttcttgcctactgggcgggaagtgatgggggttactttaccaagcatcttcccctggtgagcctggtccatcactctgccattccatctgcagccttgtatctagagagcagaccaagctggcgtgcgtcaggctgtgggctggctgggatgcctgcccaggctgacaccttcccagtggcaatttgtcctggactgggagatatttgcgtattgcctcggattagagagaactcaagggctaaatgggcatgggaagtgttgtgtgctgtgcccacttcttggtctgctgaaggctctcaaaagtcctgcatgagtggatcctgcctgctggcgtggtagctagggtctcctgatggtggcagatccccaagttgttccccctggtcctgcctgccaacagcaggtttgggaaaggcagatctcctctccttgccttcagggccagcctcgtcattgtgttctttgctgggggaacggtgagaagatccagggcagagccccagtgtgcaaagcactgggaccctagcccagcccctgagggttccctgagactaacagctgagccgtgtttgtgctcctgatgggatttgatcgcagtcatatgggagccccggcactgggttctgtgtcattgcattttggggaaactgaggtgctgagagaagggtaggaacccggagctgggtgtcgctaggctgtgaaaccacgaggcaccccgaaaactctcctccctctctccctctcctcacctccccaaaccctgctgtcttttctgttgggctgaaggcaggtcttcccagcaggacctgggcatttcaaaattcttaagtagtgccagcgggcacgtgaccagtgtgctttgaagatagggagggccattctctgaccaagggccttcggtcactctggggctccacaagctcctttgaaacaggaggctccgaagacctccagggtctccaggccagaggtgactgtggcctctggcaaggggctgcttcttcatgtcccaggccccctgaccctgagaaggtggcagcttgcacctgtggctcccttctggggacacctcaaagggcctgaggtgcaggggattgactgtttagcacagtggggccccagttgggggttcctgggagtgatgtcctcctaggttagagcacagattcttttttcatggattttaattaagcagctgctgtatacgagatgctagggggaactgtgatcacaccaagtctctgctctctcagagctccagcttcagtaggggacacaggcttgggagggaggcagaacctctctctggaaaaacccgcaagtacaaccagtgggcccacagttaggaggccctgtggtgggcgaggacggctgactccctggccttggcagcgtgattgctggatgactgcccagattaatcctttactcctgctgtgtgccaggctgggtccctcagagtccccagggcctgatcacatgccagctgcgaacctctctgagggggcccgggctgaccctcctcccagggagccctcctggctcagggtgccgggtgacagtgggggtgtgtgtggagctatcaaaatgctttgcagtttgccgaggaattacaggaactggctttggtatctggaaatgcctgtctgcagagggtggctgtggggtgcagcttgatggcagggaccgggacaggcagagccaggggtggctcagtggcttgttggctgggcctcggctgctgctgctgtggacaagttgacagggaactcagtgttaaggcctctggctgattctttgggccagtggattgttaaaaaaaaaaaaaaaatcatctcatctccagcacttgagcgcatgcagcgttccagaggcccaggctaggccctccactctatttctctttttgtcattgttttgagacagggtctctggcctccccttgtcatccaggctggagtgcagtggcgtgatcacagctcactgcagcttcaacctcccaggctcaagcagtcctcccacctcagccacccgtgtagctggaactacaggcttgcgccaccacgcccagctaatttttaatttttttgtacatgtaggatcttgctatgttgcccaggctggcctccaatgattctcccacttcagcctcccaaagtgctggagttacaggcatgggccactgctctcggcctggtggaagcttttaaacctctattgggctgggcatgatggctcatgcctgtaatcccagcactttgggaggccgaggtgggcggatcacctgaggtctggagttcgagaccagcctggctaacatggtgaaacctcatctttactaaaaatatacaaattagccaggcgtggtggcatgcgcctataatcccagttacttgggaggccgaagtatgagaatagcttgaaccggggaggcagaggttgcagtgagccgagatttcactactgcactccagcctgggtgacagagcaagactcagtctcaaaacaaacaaacaaaaaacctctgttgacctggcattcagcatttactttcaccatgccagggagccctgtgaagaaaggcaggcagctgcggcagacctggtcggtgcctgggcctttttctctggtgtggttctgttgctcactgacccactagggaagaaacggttttctggcacctgctgtccatatccttcgcccacatggaggggttggccgacagcagaaggatcttggaggagagatcacaaagaacagcccctgctggccgggcgcggtggctcacacctgtaatcccagcactttgggaggccgaggcgggtagatcacgaggtcaggagatcgcgatcatcctggctaacacggtgaaaccatgtctccactaaaaatacaaaaaaattagctgggcgtggtggcgggcgcctgtcgtcccagctacttaggaggctaaggtaggagaatggcatgaacccaggaggcagagtttgcagtgagccgagattgcactactacactccagcctgggtgacagagcgagacttcgtctcaaaaaaaacaacaacaacaaaaaaaaacagcccctgtcttctctgatcccctgttggttcccagcctgcatgtgacaaccggggaaggtgccgtgctccaaagtctggcatgtgagtctggctgcctggttccagccccatctcgtgtctgcccctgactgggcggacttgggtggggcaggtggtccttcctgggcccgtttcctggtccttgcgttggggaatggcctgaggttccgggggaaccttttgcagctcagacacctagattcagcttgctggggaagcctgtggcagccgggcaggcagaacctccatttctcacctaacatgcgtgagtgtgcccttggggacacagcaatgaccaaggcagatgggcgtcccttccctggtggcatggacattcaaggtaaagctctctatattagatttcttctcaccctttgtcagatggtagtaagtgttatggggaaacgaaggcaggggaggagggggctgggtggagcagctgctgtggggagagagatctgcaggaggtggggatgctgtgtgacttgagagagtagcttgccctctctgggctcctgcctgtgtgtgctgggggaacgatggcgcccactgcccctggtgctgtctttgccacatcattccttggggacttctgcccaccagctgctcagaccgtagctgtgctggctatgctcttcctgtgcaggtattgactctgagtcctcatacagcctgttatgatgcgcattttacagatcagtagactgagacctgggcaggccctctgactacagactgagctcattactgcacacagcgtgctgccagtacatgctgggctctggggtgctggagccgcaggtcctggccccatcaatacaatccaaagtgagctggctctgatgaggaagaggccaagatgccccactcagggaagtcttcctgggagaggtggtagccaggcagacctgggagtaggaggaggtagggctgggctttgtagacaccacacttggtgggacagaggcctgctagggagagggcctgtgtccttgccaccagcccatcttccacgccatgtccccctgcactctttgaagggagatggtctcttttggggctaagctggggtcctggagccagaagagaactgagatttgctgtggggggttgggagctgttccatttttagtggctgctacaggaagagcggccgagtgtttccccttgtccctgcagaaggctggagtgtaactgtccttgggaactgggtcagctgatagcagggctgggggtgggggtggggatcctgaatcctccagcagatgtcctcattgccctgatctgggtggccagtgcctgtgctggacacggtcctcagtcatcggagcccactgagtctccccctgaccctgcagagaatttcaaagaggcgaagttccttccagtggcctcacaaaggctatctggcttaggagccattacctgaagccagaatttctgagttccaagtcccagctccatcacggaacttggcccaaggcccttaacccctctgggcctcagttttgtcatctttgaaatggggatcttagagatgcctacctgtcaagggacttgtgaggcgcaacgggaccacacgcagggcctggccagagtgccgtagtttcttcggttgccatgatgggacggtgaaactcctcacactcttctttctgccttgaagattctagacctggctgggtgttcatctccctttttgcctttgcttgaggcagtttatggcatggctgtgttattcacgtcgccaggtctcctcctggtggacgttgaggccattttcatttttttactcttaaaaacgacagggcagtgcgcatcttcgcatctccggggtgggtcaggtctctgacctctttgccagtgtgacttattacccctttctttctttgtttttctttttgagacagtgtcttgctctgtcgccaggctggaatgcagtggtgtgatcatagatcatagctcactgcaacctccagctcctggctcaaatgatcctcccacttcagccgatattaatccattttcatgctgctgataaagacgtatttgagaccgggcaatttacaaaagaaagaggtttaatggagttacagttccacacagctgggctggggaagccccacaatcatggcagaaggcaaggaggagcaagtcacatcttatacggatggcagctggcaaagagagtgagagagcttctgcagggaaactcctgtttttaaaaccatcagatctcgtgagacttattctctatcacgagaatagcacgggaaagacccacccccatgattcattgatctcccactgggtccctgctacaacacaagggaattatgggagctacaagatgagatttgggtggggacacagagccagaccatatcagcctcccaagtagctggaactacaggtgtgcgccaacatgcctggctaattttttaaatttctgtagagacggggtctcactgtgtcacccaggccggtcttgaactcctgggctcaagtgatccaccctcctcggcgtcccacagtgctggataataggcgtgagccactgtgcccagccatttcccccttatttttagcatcactacagtagctgtgatctctgagctttggggatatcccctccccaacattttactctgaaaattcgaacatctggaaacgtcaaggctttgtacagtggacacctgtgtactcggcagccaccttccgtgatgaacatgccttatatttgctttgtcctcaatctgtgattcgggactggatttctcttgtttcctggtgggacccacactgcttgtcaattacttattttgttccccttcatcccagtcttgctgtgactttcagatacccccgggtcttatatacactcagggttatacccagaaaacatttctcctgggggatttgtctctaggtagggggccctcttgaatagtcagggggagaaagaaagactcaagaccagctctgaggaggcggcaggggtgccccttccctctaccttgtgggctccttggggaagaaggacaagtgagtgccatgagaaatacccctggggattttgtggagctggaatgtgctggtggaccatgaatccacaaggacttgggcatcgaactcccttgactgggacccacagcaagggaggctctgcagcatcaccttaatcaaatggactcaccctctctgggtgatgtatcctggtgcttcctcttctgttcatcagtcaatcaacaaataaatggctgggcgtggaggcatatgcctgtaatcccagaaactttggtcattggttatgtctacctgtttatttttgggggagggggattcataatatgtcatgacgtatattaacagtttgcaaagtgccacatgggaacgtaatcttcaggatctggaaagaggctcagtctattcagtctataggaacccccgcctcccccaagacccttgtcatgagaacgaatctttcactcccaaattcctagagtgacgatgattgggtcattattttcttttttattttattttattttattttatttatttttttatttttttgagatggagtcttctctgtctcccaggctagagtgcagtggcgcaatctcggctcactacaacctccgcctcccgggttcaagcaattatcctgcctcagcctcctgagtagctgagactacaggcatgtgccaccatgccaggctaattttttgtatttttagtagagacagggtttcaccatgttagtgaggatggtctgaatctcctgaccttgtgatctgcccacctctgcctcccaaagtgctgggattacaggcgtgagctactgtgcccagcctgggtcattactttcattcaacaaagcatttctccccgcagtccatgcgcaccctgcccacagctctttctcattttcagcatctctcttccctttctagaacatgccgagtttttgcactgcaagtccaaaaagtttacagactttgatgaagtccggcaggagattgaagcagagaccgacagggtcacggggaccaacaaaggcatctccccagtgcccatcaaccttcgagtctactcgccacacggtaggcagcacgggtggggacccatcactgaccgtttctggtcgttcatggacagtgctatgggtgagcctgtgtacttccactcatgggtatcatgtgcccattcacaaacagttgatattcacacacacatagccccttgatctgtatcttcccacttgtgctaggtatgtagtacccagacctctgtctcagcttgaagaaagagcatgccaagaagttgtttggagtggtgggggattgcagccatttcccccttttaccaagggcagccaccacttggctcaaggcagccagatctgctggtgcctcaagagaggccagaaccagtcttctgtaaaatatcctgggttttttttttttttttttgagacagagtcttgctctgttgcccagtctggggttcagtggtgtgatctctgctcgctgcaacctccacctcccaggttcaagcaattattgtgcctcagccgcccaagtagctgggattacaggcatgcaccactacacccagctaatttttttttttttttttttgagatggagtctcgctctgtcgcccagactggagtacagtggtgtgatctcagctcactgcagtctccgcctcccaggttcaagctattctcctgcctcagcctcccaagtagctaggactagaggcaactgccgccacgcctggcaaattttttgtatttttagtagagatgggatttcaccatattggccaggcttgtctcaaactcccgaccttgtgatctgcccactttggcctcccaaaatgctgggattacagacgtgagccgccgcgcccggccaaatttttttttttttttttgagacagagtctcgctctgttgcccaggctggagtgtagtggcgcaatctccactcaatgcaaccttcacctcccgggttcaagcaattctctggcctcagcctcccgagtagctgggattacaggtgtgtaccaccctgcctggctaattttttttttattttttattttttttatttttagtagagacggggtttcaccatgttgcacaggctggtctcgaactcctgagctcaggcaatccacccacctcagactcccaaagtgctaggattacaggcgtgagccaccacgcccagcccattcagctacttttttgtatttttagtagagatggggtttcaccatgttggccaggctggtctcgaactcctaacctcaggtgatcgcctgcatccccctcccaaagtgctgggattacaggttttagccaccttgcccagccaaatatcctgattttaaaactctgcattcaaacagcagcccggggccatagacatcctctggcccagaggcacagattgctaccatgatgggttccttgcgataagttttaaatttgtttttcaataaatgacacctgcatgtggctcagaattcaaaaattacagaaaggtatatcgcaaaaacctaccttgtcaaccagttttgcacacatattttaggttcttcagatgacaatgcaaacatgagctgggtgtggtttcacacacctgtcattcaagctgcctgaaaggctgagtcaggagggtcacttgggcccaggaagtcgaggttgcagtgagctatgatcacatctgtgaatagctactgcacttcacctgggtaacatagcaagaccctctatcttaaaaaaaatgtgtaagcaaaaaacatgtaagcaattgtgattgtatctatgtatatgttgtgtatgtgtttatcactccttttccttaaattgttagcataacataaaaatcacttatgctttttttgagatggagtttcactcttattgcccaggctggagtgcaatggtgcaatcttggcttaccgcaacctccacctcccgggttcaagtgattctcctgcctcagccccctgagtagctgggattacaggcatgcgccacctcacccggctaattttgtatttttagtagagacggggtttgtccgtgttggtcaggctggtctcgaactcccgacctcaggtgatcgcctgccttggcctcccaaagtgctggcattacaggtgtgagccactgcgttggcctatgctttttttttttttttgtatgcctctcagaatgtttctttattatatatttatttttttttttttttgagacagggtttaacactgttggccaagctggagtacagtggtgagatcttggctcacttcttctcctgggctcaggcgatcctcccgccttagtctcctgagtagttaggacaacagatgcacaccatcatgccaggctaattttttatatttttggtagaggtagggtttcgccatcttgcccaggctggtttcgaactcctgagctcaagtgatctacccatcatggcctcccaaagtgctgggatgacaggcatgagtcaccgcgcctggcctcatccatttgtcttttgtttttgtttttttgagacagtcttgctctgtcgcccaggctggagtgcagtggtatgatctcagctcactgcaacctccaccttctgggttcaagtgtttctcatgcctcagcctccagagtagctgggagtacaagtgtgtgctaccacgcccagctaatttttgtatacttagtacagatggggttttgccatgttggctaggctggtctagaactcctggcctcaagtgatccacccacctcggcctcccaaagtgctgggattgcagatgtgagccaccgcacccagcctcatctgtttgtctgtaatggttctttggtattggctgaatggatgggctgaaatttattcagtcatttaggtctattccagtctgaactgtcctgatttagaactgtgccattgaaatggagtaggtagaaggtatctgtaggatgggatcctagaaggggagttactggatcaaaggtgtggttcaggcagagtgtcaggcgacatcctcaagtctgagccccgcgcaggaactttggtagtcagctgggtggctgcgggcctgtttgtgcctcccctctcctggctctgaatgcctttccttctggtttccctcccagtgttgaacttgaccctcatcgacctcccgggtatcaccaaggtgcctgtgggcgaccagcctccagacatcgagtaccagatcaaggacatgatcctgcagttcatcagccgggagagcagcctcattctggctgtcacgcccgccaacatggacctggccaactccgacgccctcaagctggccaaggaagtcgatccccaaggtaaccctgagcctagggcagtcccctcttccaggtgcctctgagcatgggatgtgcccagcatccttggttccaagtcactggcgttctctttaatccatggccgctgtaggaaaaggcctcctggaacatggcacttcctccgagaaccagcagtgctggtgggcatcccctgggaagtcactgtgtggcagttggacggtcctccttggacatggcagtgcccatgttgccagagtgggaagctagcctagggctgaaggaagggcccagcgctccatcgcccagatgcgatcttaggtcccatctagctgttactctgctccctgagacatggtcccctcttagtcagaacgggaacttcagtcctaacccagatagctgatgtgaggactgttgaacttttgggttgtttctgatctttgcatggtgagatcgtctatttcccttcgagttgacacccctgggcccctctagtcagatccttctactgaaccctcactgcagaatgtgagcaggaaggggccccagggagggcacagctgtggcccccttgatgcccaaattggcacccaccagagatcttcactctggcttccatctgtccccagtgtctcatgcacatgccacacatataacacacacggttagcacagagccaggccctcagcccccgtgggagcagttgatctgcagaggtgagactttgctagaaagacatccttgactctggaatgacttgtggagaggtggaattggatgggatggtttccagagtggaattttagccattcaggcaagaggtagtcctggaaacagtcgtgtcaaactcaaatgttcccttgggactttgccggcacttggaaagtccagcatcaaaatctggcccaggaatcatgtttacgtgaggtttcccaaagcctgcagcagcagaggttgtccttaataacacaaatgacaataacggccagcatttgttgagtatttgccgtgtgccaggctcacccttatgaccaccctgtgagatcagggctgtgaccatcttcattcgacatgtcggaaactggggtccaggcctgtgacgttctggctttcccaggtgatgtgacctggaagtttcagggccaactggaccccaggtggcttgcagctgccagctgatgctctttcctggtggcagcctctgacctctgacctctgggctctttcaggcctacggaccatcggtgtcatcaccaagcttgacctgatggacgagggcaccgacgccagggacgtcttggagaacaagttgctcccgttgagaagaggtgtggctttgggggtgctggggaagcaggaggatgggtggggtccttatcattactgaaaccccagcacctgttccctgcctgcctggaagtcattgcttctccatttcaccgtaactccttctttcttttccctttgagctatgtatctttttcttctgatttgtatgcattcgtttttcaagtgcacaattaacacctgctggtttctgaaacattagaaaacaagtgtatagaaagaggaaactaaactcacccgcagccacacttcccccagacagccactggtgaatctgcagctcccagctccccagggtttataactttaattaatttttttattactttctattatgagccttcccttcccttttccttttcctttttgttttttgagacggagtttttgctcttgtcacccaagctatagtacagtggcacaatctcagctcactgcaacctccgcctcccaggttcaactgattctcctgccccagcttcctgagtagctgggattacaagtgggcaccaccacgcccagctagtttttgtatttttactagagacggggtttcactgtgttggccaagctggtctcaaactcctgacttcaggtgatccacttgccttggcctcccaaagtgctgggattacagccatgagccaccgcacccggcctattatgagcattttcaaacattcccaaaagtgtggaaaaaagttcaaagaatcctcgtggatggcttccccagcttcggtggttattattattattttcttcctggaatattttattttttcattttatttatttatttatttatttatttatttatttatgagacggagtctctgttgcccaggctggagtgcaatggtgcagtctgggctcactgcaacctccacctcccaggttcatgccattctcctgcctcagcctcccgagtagctgggattacaggtgccagccaccacgcgtggctaatttttgtatttttaattgagacagggtttcaccatgttggccaggctggtctcgaactgctgacctcgtgatccacccgcctcggcctcccaaagtgctgggattacaggtgtgagccaccgcacccggccatcttcctggaagattttaacacaaatcctaggcactggctgggcgaggtggctcacgcctgtaatctcagtgctttgggaggctgaggcaggaggatgccttgaggctgggagttcaagactagcctgggcaacatatcaagtccctgtctctactaaagattaaaaagttagctgggcatggtggcatacacctatagtcccacctacttaagaggctgaggtgggaagattgcttgagcccaggagttcgaagctgcagtgagctatgatcacactactacactctagcctgcacaacagagcaagatcttgcctctaaaaaaaaaaaaattctataaatcctaggcattgtagcattttacacataaatacccacatttcttttcaaatacttccccttgccatcccatttgtttttttctataccattcatttgtggaagaaaccagaccacatcccacatttgggatttggccaattattgttctctgttagctggtaattagatcaggttcaggttcaagttcaggtacagatcttctgataggagtaacctaagtattttttattttattttaaaaatattttaaatattttgggtcgggcatggtgactcacacctgtaatcccagcactttgggaggccaaggcaggcggatcacaaggtcaggagatcaagaccatccttgctaacacagtgaaatgttgtctgtactaaaaatacaaaaaattagccaggcgtggtggcacacacttgtagtcccagctactcgggaggctgaggcaggagaatcgcttgaacccaggaggtggaggttgcagcgagctgagatggcgccacttcactccagcctgggccacagagcaagggtctgtctcaaaaaaaaaaaaaaagaaaaatttttcaagcattttattttatcggagcagcagttttaggttcatagccaaactgagagggagatacagagatttcctatcagccctatagcccacacatctgtaacctctcccactttcaacgtgcccagcagagcggtgcatttgctagaactgatgagcctgcgttgacccattgtcaccaccccaccccacatccatggttgacatcagggttcactcttgctgttataagtttttttctttctttctttctttctttctttctttttttttttttttttttttttttgacgatgtcttattctgtcacctaggctggagtgcactgggacaatcatagctcactgtagccttaaactcccaggctcaagtgatcctccgagctcagcctcccaagtatttgggattacaggcatgtgcgattgctcctggctaggttttattttgttttgttttatttttttcagacagagtttcattcttgttgcccaggctggagtgcaggggcacaatctcagctgactgcaacctctgcctcctgagtagctgggattacaggcactcgccaccacacacagctgatttttgtgtttttagtagagatggggtttcaccatgttggctaggctggtcttgaactcctgacctcatgtgatccacccgcctcagcctcccaaaatgctgggattaaaggcatgagccaccgtgcccagccttcttttgtgtttttttaaagccattcctcccctctggcatctactctaagctgcgggcacctcctgcctttcccttcatgcttagccgcagtcatttagagcatttcttttactcctgggttttccacctcgatgtctgagatagatgtggggaaaagttcagaccttggttgccagcatcccccagcactgctgagatattgagtggtgaggcgaccccggatcccaggggaatgctgtcagggctaaattcaaaaccctgtttagctgtgaagatccggggctgagaagcaaatctgtggctggctgaggtttggggaggatttgctggtgctagagaggaaagcagaccctacccaaccccacgccctactacagccaccccgacccggctgcccttggacactgttaggcctccatcttggatcctaagggcctttggggtctgtgggcactagccaggctgaggatttggtgatatgggcctcttccccttcctcctgactcactgatgtccacagctgcccttctctgccttccttcctgtttctaagaacgaaggcgcttccactctcagctcacttgtaggcctgctcccgttttgtgacctcaggcttcagaagccctcccactggaccctttttcctggcgtactaatgactcacaactcctcctcctttacgggaacccaggctaggcgtggtggctcatgcctataaccccaggattttggaaagcacagttgggaggatggcttgaggcccagagtttgagaccagcctgagcaacacagcaagaccccatctctctcttaaaaaattatccaggctgggcacagtggctcacgcctgtaatcccagcactttgggagaccaaggcgggtggatcaaaccccagctctactaaaaatagaattagctgggtgtgttggtgcatgcctgtaatcccagctactcgagaggctgagacatgagaatcgcttgaacccaggaggcagaggttgtagtgagctgagattgcaccactgtactccagcctgggtgacagagtgagactctgtctttaaaaaaaaaaaaaaaaaaaaaaatccgtgtgtgatggtgcacgtgcctgtactcccagctactcaggaggctgagtccggaggatggcttgagcccaggagttcaaagctgtagtaagctatgattgtgccactgcaatgcagaatgggcagcagagcgagactccatctcttaattaagtaaatcaagccaaatccaagccagatgctttttactggcccctgctgtttccttctttgtgctgtcacacaggtgatggtgactctggcttcacagggatctaggttcagatcttgggtctcctactgtgacctcaccttggcatgtcttcgtttccctcctccctcttggatccaagagagatctggcgaggatgaagagcagtcacatcccacaagaccctacaggatagatgaccggcacctctcccttgcttctcaagagaaacatgcacaaccccactacaaagaaaagggagcacaggccaggcactgtggctcacgcctgtaattccagcactttgggaggccatggcgggcagatcatgaggtcaggagttcgagaccagcatggccaacatggtgaaaccccgtctctactaaaaaaacaaaaattagccaggcgtggtgacgcacgcctgtaatcccagatgctcaggaggtggaggttgcagtgagctgaggttgcaccactgcacttcagcctgggcagcaagagtgaaactctgtctcaaaacaaaaaaccccacaaaacaaaaacctagccaggagtgcaatggtaggcattccacttggattctttgcaacagtgtgtattgaattatccagcttttctcccccatatactgaagcgttaactttcagttctacctccttctcggtgtagttttggactttcttttcagttccattgatctctctggacatgaataccctgatgtacccaactgtttaaaatatactcgtttgatagtggattttagctcttccctattgctcttgtttttaagatgttatttcttttttttcttgtgagacaaggcctcgctctgttgcccgggctggagtgcagtggggtgattacagcttgctgcaacctcgaactcccaggctcaggtgatcctcccatctcagcctcccaggtagctgggactatacacgtgtgctaccacgcctcgctaatttttgtatatttttgtagagatggggttttgccatgttacccaggctggtctggaactcttgggctcaagcgttccacccgcctcggcctcccaaagtgttggaattacaggcgtgagccaccgcacctggccttgagattttttttctttttctttttctttttctctttctttttattcagagtcttgatctgtcgcccaggctgaagtgtagttgcatgatcttggctcactgcaacctccgcctgccgggttcaagcggttctcctgcctcagcctcccgagtacctgggactatagtcacgcgccaccatgcacggctaattttttgtatttttagtagaggcggggtttcaccatgctggccagggtggcctcgagctccttaccttgtgatctacccacctcagcctcccaaagtgatgggattacaggcgtgagccaccgctcccggccgagatttttttctcacctatctttgaatctcagcttgtagatttcatctgccccaaagcttttttctgtccctgcgcacacaggctggatgtgagctctccttcctccaaatacttaatgttgctcttcgcagctgccatgtgcattcgcaccctctgtgttgtttctgagtaacatgttatgacagctgtgagtgcctcgtgggacaggatccatctctatacttgaatcttgcccatccccgtgccaggtccacttggctcacctagctttgcccctgacctgactgcctctccccacaggctacattggcgtggtgaaccgcagccagaaggatattgagggcaagaaggacatccgtgcagcactggcagctgagaggaagttcttcctctcccacccggcctaccggcacatggccgaccgcatgggcacgccacatctgcagaagacgctgaatcaggtactgcaagggtttgcacgtagtgtgcagtggcataggctgtgcactgcacaacagctgcaatcctcactggcacttgtttcaggctagagcagcacttgttttagcaaaatgggttcagtccacatttagcctaggagtttgagaccagtctgggcaacatatggagaccccatctctaggaaaaatagaaaaaattagctaagcatggtggcacatgcctgtagtcccaggtactcaggaggctgaggcaggaggatcacttgagcctggaaaatcaaggcttcagtgagccatgttcatgccactgcactccagcctgggcaatagagtgagaccctgtttcaaaaacttaaataactaaataaaagaaatgtacttgattcagggtctggtgaagagcagatgttcagtgacttggtgctgctactattacaaccatcactgttattattaccaaaattttaattatcattgtaattattcagtcatttacccagaagactgtatgcattgcctggggttggtgacagggggttaataactcttttttatttattattattattattattattattattattttttatttttggagacacagtctcactctgtcacctaggctagagtgcagtggcatgatcttggctcactgcaacctccacgtcccaggttcgagtgattctcctgcctcagcttcctgagtagctgggattacaggcgtgtgccaccacacctggctaatttttgtatttttagtagagatggagtttcaccatgttggccaggctggtctcaaattctgagctcgagtgatccgcctgtgtcagcctcctgaagtgctgagattacaagcatgagccaccatgcctggcctatcgttctcttcttgtaagtaattgattcacatggtgcataaacagaaatggtattaaaagctatacagtgggccagtgtgtggtagcaggggcaagacgctcctcctcgctgttttctagcaccttccagggtggcagcagggcctcagcagcactccagcagtcatcttttcatgcacatatcagggggacacagtgtccacacgagagtaggttcctgtccttgtagaaggcataattctaatgggggagactgacacccaacaaaccgccagataaatgcacgatcaagaatccagtaggggcgcgggggccgggaaaagagccacccagagaaggcagctcaggagagcaaagagggaagtcagtgtctagagggaggggccctccaggagaggaagctggggtgcttacaaacgggagtagggagaggaagggaagtaaaactccgcagctggctggggcctcctgagagccagcagtgaaaagtccagctggcctccagggagcctggagggggctcagcctccttccacgtggggtgcttcccagagcagcagcgccccttcctctccatttgctcatgacttaagtgccctagtatcctgtcacagaccaagggaaggccagcgtagctccctgcctttctaggcagcccacatagacgggggtcgatggccagggctgcagggcagggacccttggtcacggaggtctttgggttaccccacttgctccatgccatagatgtgaggttccttcatgcctcttttctagctcgccagacactttgtatttattttttatttttttgatgattttttttttttttttttttttgagacagagcctcactctgttgcccgggctggagtgcagtggcatgatctcagctcactccagcctccacctcccaggttcaagtgattctcatgcctcagcctcccaagtagctgggattacaggcgtgcgccaccacactcaactaacttttgtatttttagcagagacagggtttcaccatgttggccaggcttgtctcctaatctcaggtgatctgcccgccttagcctcccaaagtgctgggattacaggcgtgagccactgtacccatcccggccttcccctcaaccccagatggagtctcgctctgttgcccaggctggagtacagtggcacaatctcggctcactgtaagctccgtctcccgggttcacaccattctcctgcctcagcctcccgagtagctgggactataggcacccatcaccacacccggctaattttttttttttttttgtatttttagtagagacggggtttcaccgtgttagctgggatggtcttgatctcttgacctcatgatctgcctgccttggcctcccaaagtgctggaattacagtgtgagccactgcccccggcccatgcccagcctttttgatttttcagacaaggtcttactctgttgtccagaatggattgcagtgacacaaacacggctcattgcatcctcagcctcctgtactcaagcgatccttttgccttagcctcctgagtagctgggactacaggtgtgtgctgccacacctagctaatttttaaaactttttttatcttttgtagagagaaggtctcaccatattgcctgggctggtctcaaacgcctatcctctagtgatctgtctcaacctccccaagtgctaggattacaggcgtgagccactgcacccagctttctctgttgtaggacagatggccaaactctgctttacactttgcaagtataggctgattttatggctttgtttttctttttctttttttttgagacagagtcttgctctgtcacccaggctggagtgccattgtgtgatctcggcccactgcaacctccacctcccgagttctttctcagcctcccaagtagctgagactacaggcacccaccaccacaccgagataatttttgtattttttggtagaaacagggtttcattgtgttggccaggctggtctcgatctcttgatcttaagtgatccttctgcctcagtctcccaaagtgctgggattgcaggtgtgtaccaccatgcctggcccacatttgtctattttgaatcttccttgcttttctctgtagatgcagatgcagccggggagctcatcttgagtgcattctccaccttttcaggggcgatctttccatcttagtttgtagggcctgtccccatgtgtgttcattggcccccgtttccgtggtctggatggactgtccttgcaagctgttgcttgtcctccaaggcgtggataggcccagtgcctgatgtcggccccgtgggctgtttgtagcctcttacactcatgggcagctccgtgccgtctccgttcccagacatgagtgtgtctgtggcttgatttatctgttgctgtctctcaaggctgtgtggtgtggtggccgcatagtggcaccctggtgttggcccttggttggggggagtgtgtctgccactccctggtatcctgcccatgccaccctttctgatctctgacctctctcctgcagcaactgaccaaccacatccgggagtcgctgccggccctacgtagcaaactacagagccagctgctgtccctggagaaggaggtggaggagtacaagaactttcggcccgacgaccccacccgcaaaaccaaagccctgctgcagtatgtaccccggcacccaccaccaccaccaccctggcccctgccttccatcagccacagggccccctaggctgggcaccactcatcactcgtccactcattgattcagcagacacttgctgcaagccttctgcgtgccaggctccatcctaagcatggcattcgccccagtggaggggacaggtgtccgtccctgcccctggagtgctcagaatggggggaagtgggacgaatgggacaaaaaacaagaaagaaaatgtatagtgtgttaaatgtcaaaatatgaaagtggtgctagtgtgggagttgtcgggaacagcctcctttagaaggtgagcattggccggccaggagcggtggttcacgtctgtaatcccagcactttgggaggccaaggtgggtggatcacctgaggtcgggagttcgagaccagcctgatcaacatggtgaaaccccgtctctactgaaattgcaaaattaggctgggcatggtggctcacacctgtaatccccgtacttttgggaggccgaggcgagcggatcatgtcaggagatcgagaccatcctggctaacgtggtgaaaccccatcactaccaaaaaaaaaatacaaaaaactagccaggcgtggtggtgggcgcctgtggtcccagctacttgggaggctgaggcaggagaatggcgtgaacccaggaggtggagctttcagtgagtcgagattgcgcaacttcactccagcctgggcatcagagtgagactctgtttaaaaaaaagaaaaaaggccaggcacggtggctcacgcctgtaatcctagcactttgggaggctgaggtgggtggatcaccaggtcaggagattgagaccacggtgaaaccctgtctctactcaacgtacaaaaaaattagccgggcgcggtggtgggcacctgtagtcccagctacacaggaggctgaggcaggagaatgacatgaacccaggaggcggagcttgcagtgagctgagatcacgccactgcactccagcctgggtgatcgagcaagactgtctcaaaaaaaaaaaaaaaaaaattgcaaaattatccaggcatggtggcacatgcctgtaatcccagctacttgggagactgaggcaagagaattgcttgaacccaggaggttgaggttgcagtgagccgagatcgtgccattgcactccagcctgggtgatagggcaagactccgtctccaaaaaaaaaagatgagtgttggccaggggtggtggcttacgcctgtaatcccaacattttgggaggccgaggcgggaggatcacttgaggtccggagttcaagaccagcctggccaacatggtgaaacccctgtctctactgaaaatacaaaaattagccaggtgtggtggcaggcgcctgtaatcccagctactcgggagactgaggcaagagaatcgcttgaagccaagaggcagaggttgcagtgagctgagaacgtgtcactgcatatcagcctgggcaacagagtaagactccgtctcaaaaaaaaaaaaaaaaaaagaagttgagtgtcaggcgaagacctgaagcaggtgagggcagggcaggagccgtgtgggattaagcccggccagtgcaaaggccctggggcaggactgggccgggcatgtcagaggaagaccctgtggctggatggagtgagtgaggggagtgggaggaggtgatagagcaggttgtgcagggccttgtggggcctcagggaggacattggcttttgctgtgagtgaggtgggagccatggacagttctgagcgcaggagagtcaggactgactcaggtgctcacaggctccctagccgtggtgggagaagagacatgggagagcgggtgggagccagaccttggctaggttaggtccctctccagcttggcctcttaagatccaccccatgacttggttggtgcagctgcttagctgtgagattgggaagcaggtgtgcccccacaatcccaaattctcactcggggactcttctgcctctgaccttttggcttttggcctgtaagggaccttgaggcactggaacagctggaccagagcaggtgacagggacacctgggtagctcatactgcagacagtgccatgcatgaggcacttcccacagggacaccaggaggacaccgcctcctctggccatcacagccctggcatccccccaccccctctgccaggcagtagtgcatggtcgtgggctaaggggccagagtgcttttatgctcagacagccttgactacgttacaaaacactttctacagagcagatagtggccctttgcaggcttcaggaggaaattcatagccggggatggtggtgcacccctgtaattctagctacttgggaggctgaggcaggagaatcgcttgaacccaggaggtggatgttgcagtgagccaagattgtgccactgcactccagcctgggtgacagagcaagactctgtctcaaacaaacaaagaaacaaacaaacaaacaaacaaaacacaagattcagcctactagactgaaggaagtgttgttgtggaggattcagcctaagggtggacctgggcctgctgggtgaccacaggcaggtgattggacctctctgagcctcattttctgcacctctaaagtgagggtcatagcagctgtcatctcacatggccatggggacaaactggcagattacaaggtgcctgtaatcccagcacatggggatgccaagtcaggaggattgcttaaagccaggagtttgagaccagcgtgagcaacaaagtgggatcctgtctctgaaattaagaaaaaaaaaaaaaattaggctggggacgatggttcacgcctgtattcccagcactttgagaggcttcagtggatggatcacttgaggtcaggagttcaagaccaccttcaccaacatggtgaaaccctgtctctatgaaaaaatacaaaaattagccaggtgtggtggtgggcacctgtagtcccagctacttggaaggctaaagcaggacaatcacttgaacctgggagtcagaggttgcagtgagccaggatcacaccactgcactccagcctgggcagacagagcgagactgtatctcaaaaataaataagtaaataaataaataaataaatttaaatactacttgttaagcctatggcaggactgggccaggggatgcccatcacaaacagtccctgtcccccggggcttagcacgttacgtcatttgtaaccagttgccttgcagggccctccctgcccaggcactctcaccatggagaagcgccactgttatctgtgtctcctgtcaagagctgggccttcttgctttagcattttatctgagggtccaaggtcctcatgcagacatgggcggtctttctcggttcacgccttacaagagaacgggaattacggtaatagacttcccccagcctgaattctgcacttggcttttctcttcttgttaaagcaaagcctggagccttctgtctccgcctggtgcagcccacagactgttcatgtatcccagtgcccatggggacacccagggtttttttgtttgtttgtttgtttgtttttggccttaaccgatgcttgtaagttcatctgtgactgtacaggcaaggattcctgcagggcaaagaccccagcagagggatcttgggttaaggaacatacgtgtttaaaattgatttttaatttttcattttattttatttatgtatttggtggttttttttgtttttgttttgagatagagtctcgctctgtcacccaggctgaagcgcagtggcatgatctcagctcactgcaacctcccaggttcaagcgattctcctgtctcagcctcctgagtagctgagattacaggcatgcgccaccacacccagcaaatttttgtatttttagtaaagacaggggtttcaccatgttggccaggctggtgtcgaactcctgaccttaggtgatctgcccacctcggcctcccaaagtgctgggattacaggcatgagccaccatgcccggacctcatgtatttgttttttaaacggggtctcgccttgttgcccaggctagagtgcagtggtgcaatcccggctcaccgcagcctcaccacttgggctcaggtgatcctcccaccacagcctcccgagtagctgggaataatacaggtatgcgccaccatgcctagctaatttttgtatttttgtagagacaaggtctcactatgttacctaggctgatcttaaactcctgacctcaagcaaaccgcctgcctgaactttccaactatgagatcgcagacgtgaaccaccacgcctggccttgtttttttaatttttatttattttattttattcttttgagacaaggtctcttgttctgttgcccaggctggagtgcactggtgcaatcacggctcactgaagcctggacctcctgggctcaagcaattcttctgcctcagccacctgagtagcctgatcctcaggcgtgcaccacagcacctggctaatttttaaagtatttctagagactggatctcactatgttgcccaggctgtctcaaactccttagctcaagcgatcctcctacctcagcttcccgaagtgatgggattacaggagtgcaccaccatgcccagcccaactccccctttttataaggacaccagttatattggctatgagcacaccctgtgatattctcttgactgattacatctgcagtgaccctgtttccaaataagagtacattccgaggtacaggggggcaggattcaacccgaattccgcgggacaccgaccagccggtcacaattgtccagaatgctctgattgtgcagcgtgggttgggcctgtaaatcacctccagggcccccaggaggctggtgcccaggtgtgctttgtcccctgtggctgagagcaggtccccagagtctccatccttgcctaaccctccccctccccccgtcgcccagtctgttgtctgtcattagtttagtgctatgcctttgctgaccttggtcctggtttggtccacaattcaaattctccattccaggctgggtgcagtggctcatgcctgtaatcccagcactttgggaggccaaggcgggcggatcacttgaggtcaggagattgagagaccagcctggccaacatgccgaaaccccatttctcctaaaagcacaaaaattagctgggcatggtggcgggcacctgtattcccagctactggagaggctgaggcaggagaatcacttgaacccggcaggcggaggttgcagtaagctgagattgtcccattgcgctccagcttgggcgacagagtgagactccagctcaaaaaacaaaaaacaaaaaaaacaaattccccattccaggtgaagcattaacctaggcctttgtgtgtctcctggaaggaaattaaatgtgcacaccctttacttcatgtgaggaaagagattttggggatctgggcagcttgtgcttgcctctcccagttggggtatgaaggagacccccctttctttggcagcccagccttggtggccctgacagtggtcaccatttgagcagttcccctttaggagcaagtccccaggtacttcagtagatcatgatttttgggagggaaactgatgaagggagacagcccagtaccctaaggagagcaattaggaatgcttaggaaaactaaaacgtgaacaagatcatcctacttttttactattcacgatgccaataggcaatgctgagagactctttttaagggccaggcccgttctaaggggcgacacatgttattaccactttttgtccattagatgagcaattgtttaccaacaaaaattttctttcttttttttcttctttttttgagacagggtcttactctgtctcgcccaggctggagtgcagtggtgcgatctcggctcactgcagcctccgccacccagattcaagcggttctcctgcctcagcctcccgattaactgggactagaaacgtgcaccaccacacccagctcgtttttgtatttttagtagagacggggtttcgccatgttgtccaggctaatctcaaactcctgggctcaggtgatctgcctacctcagcctcccaaagtgctgggattataggtgtgagccaccgtgtccagtatatatatatattttttaataaaatgtggtctcactgtgttgcccagggtggtctcgaactcccagactaaagccatcctctcacctcagcatcctaaagtgctaatattgcaggcatgagccaccgcacccggccaataaaacattttaacttgtgtgaaaccaggtgtctttgcagaattaccattagtggcagcattttttctttttttgtgggcacacaaaataacagtgcattttaggatcagtgacttcttggaggtaatgagatctaaaaacatcttcagtctccacgaaggaggtagatgttgttaccctcaacccattttgtagatgaggaatcggaggctcagaggggcaaagtcctgtccaaggcctcacatcccatcgatgggtcaggaccaaccccagcaggctgggaggtggcgggaacctatggaagccacctgaattgtggggaagtggctacctttccttcccagcatcctgtaaatcaagttgagcttcagggcagaggtgctgagctttgacccctgaacttcactcctgtcttctgcaaagtgggaggaataagtgggccttctcagatcgaatgggtgaataatcggaacaggcttagcttgagcctgactcgtagccagcatttgccattgggagctcttgaatttggtttatttgtcttaatatagacagaagacattttgctgctgaaaaatggtaaaagaacagtaaaccctggcttgacttggaacatcattccagagtagtgtggaaacctccgttttgatgcttgctttttccttttcctcataggatggtccagcagtttggggtggattttgagaagaggatcgagggctcaggagatcaggtggacactctggagctctccgggggcgcccgaatcaatcgcatcttccacgagcggttcccatttgagctggtgaaggtagtgccccccggggctgggccctcccgtctctggtcaggcaccctcctgctggcctcaagccaggcctcctcccaggcaataaggtctcaagctcctacctctaggcctgaacttgtggtgggcagggtgtggcctggatgaggtgtccccatgggcttccttttctgacactcagctttgaggttttgggcagaacaatatgaaaacccctgtgtttttcctctgacaaaagccaatatacattctttgcaaaatacatagaaaatacagataaatttacatgagaagatgtccctagcatgtcattgaagaaggaaaaaataggcattggagccagcatgtgcaacatagcactgagctgatatatacaacatccttatgtatgaaactgaacatggatgtctgtctacaagtgtttctttgtatttgcaaggatgtttgcaaaaatgtcagccctgggtgctaggatttgggacttctttttccgtgtgtgtgtgtgtgtgtgtgtgtgtgtgtgtgtgatttgcttgaagttttatactgtttacaatgagcacatagcattttttattaaaaaaacaaacagttttttaaaatcagaggagcaagaccaaatgcagtggctcacgcctataatccgtgggaggccaagggggcctgatcacttgagcccaggagttcaagaccagcctgggcaacatggtgaaaccccatctctactaaaaatacaaaaattatccaggtgtggtggcatgtgcctgtagtcctagctacttgggaagctgaggtaggagaatcacttgagcccaggaggcagaggatgcagcaatgagccaagatggcaccaccgcactccagcctcagtgacagagccagaccctatctcaaaaaaaaacaaaaaaaacaaaaagaaagaaaaaagaaaaagctgggtgtggtggtgcatactgatagtctgaaaaatctaagtttacatgaatttatattcccaccaatatgatgagagagttggtgtcatgtcatgctttctgaaactgggttttaattaattaatttgtttgtttatttttattttttttgagacagggtcttgctctttcacccaggctggagtgcagtggtgcaatcacagctcactgcagcttcgaccttcctgggctcggatgatcctcccacctcagcctcccgagtagctgggactataggcgtgcaccagcccacctggccaatttttgtatttttagtagagatggggtctcactatgttgcccaggctggtctcaaactcctgggctcaagccatctgcctgccttggcctcccaaagtgctgagattacaggtgtgagccactgtatctggccagttttcaattttttaaataaaattttgacgagttaaatattctgccttgtgaatatagccacacgtgggagagaacgttccccagatgcacgcctgccacgggggcgccccgggtgcctccatgcatgtgcttggtttgtctcttctcagatggagtttgacgagaaggacttacgacgggagatcagctatgccattaagaacatccatggagtcaggcaagttccacgaggagagtcaccactgttccttcctctccgtggtgcgaccccccagctaattgggtcacccacacctctgagtccctaatcgttaggccttaagagggctcttggatggttttctgtagctgcgagcccctccctgagggtctccaagggcacatgagggtggatgtgtcttagtcctgcgtccattgcaggcttcagggctgtctgcagctcctgatcaaatagggcttagttcctgcccagtcggttggtgtgaacctcatgctaaactaagaatgctcactgcagatttgcctggggaggggcggggcggcactgaatcagggttttgggaagccagcatgagtccccatcatggcttcctcgtgagcctcttgggtcccctccttattctaacaaaggtagttgctccaggtgtctgcccttccatcgccgtggggtcctcgggtcaccctgagggtttccgggcagtggactcaggcatccgaccccacacatgacacaaccttcattccttgttggggacccggccagggccaatgaaattgctgaccatgctttgtttctctctgacttatctcccctgcccccgggtctggacggtttcaggaccgggcttttcaccccggacttggcattcgaggccattgtgaaaaagcaggtcgtcaagctgaaagagccctgtctgaaatgtgtcgacctggttatccaggagctaatcaatacagttaggcagtgtaccagtaaggtattgctccctcggcagggtgactcctgaccttgtggaaacgggggtacgggggtttggtatcaggctcccagcgcctcattggcccccactggtgccttttctccccatatcgctttgtgtccgtgaacttggcctctccccagaggctggggcaggagcatgtaggcctgggcccaggcacacaggggagtgccaggcctcctggactggccagacagatgcacagttgtccctgggaccctgataccaagcctagcatgtgtctgatgaaattggggtttcactgggctgttgctttgctgcctcctgggaagcagagagggaccccccgcgtcaactgctggaggctgagctccttgaagctccctggctgtcaccccttcttgaccaatgcccggcattctcagacttccctggagccaccgacttctctgtccctcagctccgggaatggcctgaatgccagcgacatcatgagagccagctggggtcctaagtgcccctgcccaccccctgcaccccacgctgtcccccaggggcagcccatttttggatccacttagtcacagtgcctctatgcgctctcgacgagccactgcctccactcagcaggacgcgccgggctcccccaacccgcgccaacgccgcgggcctggttcccagggcagcacgctttggccaagcagctgaaatgcctcccagtgggcagtctgtgcttgcgcgaccacagtgtccccagcgctccgggttgccagggaatttctgcttgagcccctctgttcttagtctggaaaagcccacatttgctgcttaagcttcttcgattagaaaagggagggggaaaacagtccaaacaggttggaaaacgctcgtcctagagccaggtgtcatggacatgaatgttagaggactccgcacaccttggctgtctgtctgtgcaatgacaaccccccgtggcccttctgtaactacaccccagaccgagcccacacccccaaaccccagacctctttgatccgaagcagcttccggggcaaatgcgggcgcaggctcccccatgcatggactaatcagatgactctcgtttcttctcttctctctgtctcctgtcctgcgtgtgtggcctgcactgtccctgggtgtctttctgcctcatcctgccctccgcatgacccaggacggggctcttcacccccgacatggcctttgaagccattgtgaaaaaacagattgtaaaactcaaagagccgagtttgaagtgtgttgatctcgtggtctcagagctggccacggtcataaaaaagtgtgccgagaaggtaacaggttttgttctcatctccgcatttgtccccgtcctccccctccatgtgttagtctcaacccgagcatctggaaaattcagcctcggcaggaacccccttccgcctaccagttgtcacttagagatgtcgccaccttgcattggcagatggaatggggggagtggcatcacacgtgggttgtggctgcccgtgggggcggtcagcctttgttgttgccaaacgcattgcatttactaagcagtgccctttcctggaacccctagagaaaggggtttcccagccagcaccaaaacagcaaaacacaggaaacacatcatctgtatagccctgcatgttctcacagtctaggccacctgagagtaaccattccattttccccgactcgtggacttgacccacactgcagaagatgggactcccctgtgcatgaggtctggttaagttggtgctgcagatgaagcctggggaggtgggggcatttggcgagtgtgtgccacagatacagtgatcaggagtggttctctgcaaggagttcctatcgaggctgatggcccagatacccgccttaccattctagaacagacgctactcactcacgctggcgaggcccttcagggttcctgctctcacccagtgctgggcaagaggggggtgccctgaagccctgcatggcaaacatgcccctgcttttctgctttcatgttgcctcctgcctcctgccccccggtcactggctggaaaagcagctctgctctcctgctgtctccggtccacggtgcccccactcttctgctcttagctcccagctggactcactgggggccaggagcaaggtgtgggctcggtgggccccctcatatctcattccccacccccctccgcattttctacctgtgtggttcatgttgcttcccgtgccacgaggaccccgccaatgcgaccactctgcttgttcccccagctcagttcctacccccggttgcgagaggagacagagcgaatcgtcaccacttacatccgggaacgggaggggagaacgaaggaccaggtactggccttttgtcttctttattgggtataatttacatgcagtaaatgtcaagtgtactgttctgtgcatgctgacagctgcatatggcaaagtaacccttacctcaatcaagatacagagcggttccgtcacctcctaaaatccctgtccctatcatgctgacagctgcatatggcaaagtaacccttacctcaatcaagatacagagcggttccgtcacctcctaaaacccctgtccctatcatgctgacagctgcatatggcaaagtaacccttacctcaatcaagatacagagcggttccgtcacctcctaaaatccctgtccctatgcccctttgtagtcaacctctcaaaaacccacaggccaggctgggtgtagtaactcacgcctgtaatcccagcacttagggaggctcaggcaggaggattgcttgagcccaggagttcgagaccaacgtgggcaacatagcaagaccttgtctctacgaaaacataaaaaaattagccaggcgtggtggcgcatgcctgtggtcccagttacttgggagggtgaggtgggaggatcccttgagcccacaagatcaaggcttcagtaagttatggtcgtgccatcgccctccagcctgggagacagagcgagaccccgtctcttaaaaaagaagcagcaaaggaaatccccaggccctggccaccaccagcccgctccctatcctacagtccttcaagtggactcccacaacgtaaggcccattgactcttgactcccttcctgccacccttcttccctccctccctcccctcggcgtctgcatttgggagccaagcgtgttgtttgttgtatctgtagtttgctgccttgattactaagcaatcttccagggaatggatggagcacagcaaggacctccacttgcctgctggagggtgtttggggtgctttttgtgttgtggttttttgtttttttttttttttttgagacagagttttgctctgtcgcccaggctggggtgcagtggcacgatcttgactcactgccacctccacttcccaggttcaagtgattctcatgcctcagcctccgaagtagccaggactacaggcacatgccactttacccacctaatttttgtatttttagtagagagagattttcactatgttggccaggctggtcttgaactcctgacctcaggtgatctgcccgccttggcctcccaaagtgctgggattataggggtgagctaccacgcccagcctgctttttctttttttaacatttaacgctttcttgcaaaggcatgcaagcacacaccccaagttgctgcctacccctcagctgagactgtcacccacgaagcactgggccgtccttatactctcctgcagccgcagcctcagcctcccaagtagctgggactataggcgtgagctaccacgcctggctaatttttgtatttttagtagagatgaggtttcgccatgttggccaggctggtcttgaactccttagctcaaatgatccacccacctcagcctcccaaagtgctgggatgacaggtgtgagccactgctcccagatctgttttgagtcactttctctcagttgtcctctgtgttctttttacaactgtttgttgaaaccagagcttaattaagcccttgcttgctatgtcactttgtttaaaatggtccctctccccttgccattgatggggatgaaatgggctcatttgtcctgcagggaggcgcccagttttgatttggccaattgctccctcagggcaccagtccacctatgcctcatagctgctgtagcttggaaattgtatcaaaagtctggaagagtctgattctttttgttgttactgttggtaagaatgctgccggcccttccacagcccctggtgcccacctgccatgctgccaggccggatctgagagcgctgggttgaggagactcaggccttactaaaccagccacgctcgctcccacagatggagcaccctggcattttccagcaggcgacaggtccgagtgccttgccctactttattctcaggaacttggaggtgcagtgaggggaagtgactggccaagggccaggggagtccagtgacgcgcatcccagcgcctcctccccagcagcctggcctgttataaatgggaatcaagccagtgagctgcctggatccatggttcccatagaccaacttcatcctgggcaaaagacaagaaggatgagggagggagagtttcagcaagtgcagtggactcataagccctgctcctcacatgagacctttctagcttgatagcttgagcgtgtgtgtgtgtgcgcgcgtgcacgtgcacgtgtgtgttttattttagtgttcataattggacaaattagcttcgcagttttaatgcaacactttgaacacgccaggcgctaaagactttacaggctggacacggtggctcacgcctgtagtcctagcactttgggaggccaaggcaggtggattgcctgagctcaggagttcgagaccagcttgggcaacacggtgaaaacccgtctctactaaaatacaaaaaattagccaggtggtgtggcgtgcgcctgtggtctcagctactcggaagactgaggcaggagaattgcttgaacccaggaggcagaggttgcagtgagccgagattacgccattgcacgccagcctgggtaacacagtgagactctgtctcccaaaaaaaagaaaaagaaaaaaatacaaggcagtggcttgcagtggttcacacctgtaatcccagcactttgggaggccaaggtaggaggatcacttgagcctaggagttcaggaccagtctgggcaacatagtgagaccccacctctacaaaaaaagaaaaatcagccaggtgtggtggcacatgcctgcgaccccagcatcttgggacgctgaggcagggggttgcttgagcccaggagtttgaggctatgattgttctactgcactccagcctgggagacagtaagttcttttctcaaaaaaaaaaaaaaaaaaaagccaggcgcagtggctcatgcttgtaatcccagcactttgagaggccgaggcgggcggatcatgaggtcaggatttcgagaccagcctgaccaactcagtgaaaccctgtatctactaaaaatacaaaaattagctgggcgtggtggcaggcacctgtaatcccagctatttgggaggctgaggcaggagaatcgcttgaacccaggaggcagaggttgcagtgagccaagattgtcccactgcactccagcctgggcgacagagcaagactccgtctcgaagaaaaaaaaaaaaaaaacaaaaaaaacaactgcacattattaaacccttggcagttgggcctcctgtcaccccattccacagctcagtaacgtgaggcccagggtcacacggccaattagtggctcaatcaagactccagaccttggggacagcggccctgcctgtgactggcacattgggctgcgtggctgtgctctgttgtcccaggctctgttgcctatgagggtgtggggagtgcgacgccagcccctgttctcctgtctgggaagcctcctggttcccacgccttccctgctggcaaggccaggaaatgctcttgccgctgcccccccttgccaggcttggccttgtactcacagtgacccccgctctcccccagattcttctgctgatcgacattgagcagtcctacatcaacacgaaccatgaggacttcatcgggtttgccaagtaggtacttttagagactggctggtcgggcggcaccaatcctcactctcagatccaaggaggtgactgagttgggattctctgagagggcaggtgtcagacagtctctgtcgggggtcctggggtgaaggcagagccaactgagaatatctggaagctctcctgggctgatagtggtccactgtccccaaccaacacgccttctgtgaggcatccccatggttagtttagggagagggcagtgctatgttcagatctgcagggagagggggaagccagccagctgctgcaccccctctccttcaggacttctcagagcctttagcgaccagtgtgcagcttttcccagactctgccacttcatggacagcatctcatgggctcagggctccggaagctgctctttgggaaatgctgcctggggtctccctagcttcaaggcatacactgtagatttaaaccagaaccttccgtggcacccagatgagggcccacatcggggagccctgatttcagcaggatgtcgattcagtgtgcgtggtctcaggcatcacccgctgattccttcagccccttggcatgcttaggcctcactcagattgttggagaggctcacgcaggccttcctgcctgaggcaggccgggtggtgccgctggtatgccctctcgctgggccctgtgatagagcagtgggcaaacccacacccagctccccaccctcagaggaagaccacatgcagggaaccgatggggacccagggcgttaaggtgtagtgtgcttagtgctgggcggggccgtgcagggcttgtgggtgtccagagggcggccactgggccttgccttgaggggtcaggcaggcttcctaggggagggcctctagagccaaatctcaggctatggagtcaccagatacaacatttatcggtgcacctgacaaagctgattgaggatctgttccgtgctgggcaccaggtaggtgaggagaagggaggaaggaaaacgaaggaatgagggcctcatcagaacccctcctagagatgagccgaagtccctgactgggcctcccctgcctgtgggtggcagcccccggccctgtgctcccggccgccgggtgtgtgtgggctcacagcgctggtccccatctttggtttgctgctgttttcctcaccttgatgtctctgcttctcacacttcatccacagttccttctcacaatctctcctgtttttcctttgaccactctttcctctggattcctgggccttcccacttaccccagctgttactatactgagcagctggtgacctggtgggtattgcctgctgtgtgcctttgccctggtgtgtgaacggggtacgccctggctgggtggccccagccctgggtgggacatccctggggcccgctgaagagctacggggtgctctctcagagccagggccagtgctgggcctctgggccaggaccttgaccgcaccagctgtagcccctgctgtttcagagcctgcaggctggggaggtggagtccttaaacaaattgtcacaaggatgatgagagtaggaagagagggtaggggatagactatgggaaaggggagctgggaatgtggcctggagagatcttcctgaagaagtcaggtgatgccagggggacccagagaattggacccagggaaggaaggctaccagaccaggcaggtagaggtaagagagccagcggccaggccccatcgccaggagggccctgcaggtccaggggaggattttggattttcccccaagacaccaggatgcttctgattagatccaggcccaggagaggggccaccttgtgggctgctatttgagggagccctggcaaggatgggagccaggaggcccttaggaaatagcacctctggaacctcactgtcacccagccatcactgtggaggttggctcagctcagtgccacctccttcagatgctgttgatgaaaatccttcttgtgcttgaatgttctgggcttcccattgccctccaaatgtatattataaacagggcccaagcctggcgcagtggctcatgcctgtaatcccaatactttgcaggaggccaaggtgggtcgattgctggagcccaggagtttgagaccagcctgggaaacatggtgaaaccctgtctctacaaaaaatacaaaaattaactgggcatggtggtggtgcgtaatctcagctacttaggaggctgaggtgggagaatgacctgagcccaggaagtcaaggctgtgctgagccatgatcacaccagggctctccagcctgggtgacagagtgagactctgtctcaaaaataaataagtaaataaatagcccagataagaagccctataataaacttactgaatgttgggaatatcactggataaaattctgcctttgttcttagttttccagcctttcctgatctagaaacagaagcctactttctcccttatcctacagccaacttggactttaaaacaaaacccccgaggtagtcagcaaaggaaggtgaccaagctgacttgcttttccatattgttctgaaagtttcagccaaagcaataagaaaagacaagaaaatatgatggataagtaacaggagatatatgttgtttgcaagtggtgatatgattgtcagagtagaaaatatattagaaccgtaaggtggtggagtaggtgtccacatataaaatatagtgggatttgtctatgccggcatgaactagccaggaagtaggatggataaagaagaaaagagatctgggattgtggatgaataaggaaccttatagaaacacaccctgtcgaccttggatgtcctctaaatttgggtcaggagtcatgcaagatatgtgtcatttcatgaccagcagctgtcccacagtctgatgtctaagactggatggctctgtggttagagccacttacaggctggtgttgggatcaaatgatgagaagagtaggaagaagggccaggtgcagtggctcatgcctgtaatgccagcactttgggaggtggagccaggcagatcccttgagtctaggaatttaagaccagcctgggcaacacagtgaaacctcgtctctacaaaaaatcaaaaattagctgagcatggtggtatgcacctgtggttccagctactcgggagactgaggcaggggaactacttgagcccgggagggtcaaggctgcagtgagctgtgattgcgccactgcactcatcttaggcaacaccttctcacacttccccttagaaactccgggattctagtgacatctggaagtaacctgcgctttagtaagtcggctgagatgagggcctagaagcctcaattgaaccagatacatttacttgttccgtgtgcccaggccgtttcccttgcgcagctctgtgtgtgcagggggcttctctctgcctctacctgtggctgctcacttggtccccagggagagaacggccacattcgcctcttccccttcttcccccccggcatcttgtccacgtgaaccctgtctgttctttggtttcagtgcccagcagaggagcacgcagctgaacaagaagagagccatccccaatcaggtagcacacccctctgcagtctcccgctctaccctgggggcgggaggacgctaagtgacagctaagcccccgtgatggagctcggcctgtgtaaagccccaccccacagcctcagtaccaggccatctgctctctctagaggccacttaggaattgataattctgggagatggcctgagagccaacactctggcagggcctagtgggcacattttacccacccagaaggccctatgtgccatccaaggccagggttagaacttgactcttggctgggcacagtagctcacacctgtaatcccagcattttgggaggccgaggtgggaggatcacttgaggctaagagtttgagaccagcctgggcaacatagaaagactctgtctctacaaataataatatttaaaaattacctgggagtggtgggctcatgcctatcaccccagctacttaggaggccaaggtgggagggtcacttgagcccagcagttcatgaccatccggggcaatacaatgagacctcatcttaaaaattaataataggctgggcacgatagctcacacctgtaattctagcatgttaggaggctgaggcgggcggattgcctgagctcaggagtttgagaccagcctggctaacatggcaaaaaccccatctctactaaaaatacaaaaaattaaccaggcgtggtggcacgcgcctgtaatcccagctactcaggaggctgaggcaggaggattgcttgaaccttggaggcggaggttgcagtgagccaagattgcgccaccgcactccagtgtgggtgacagggccagactctgtctccaaaaataataataataaagatataaataagaatttttcccttgagcgggggtctgtgacctctttgagctttccaacacagccccagggattgggagcccctaggtgagagccgctggaaactacattgtcactagcagctcaggggagcttgggatagttgaagccccacacctggagaagccctgagccacaaagggttgtaccttgacatcttaacccagctagaggccttgtgaaatatgaacggctgtatcaatgcctgccttcagtaccttattattattattattattttgacacagagtctcgcattgtcacctgggctgcagtgcagtggcgcaatcttggctcactgcaacctctgcctcccaggttcaagcgattctcctggttcagcctcctcagtagctgggattacaggtgctcaccacaacaccaggctaatttttttttatttttttcttgagatggagccttgctctgtgtcccagctggagtgcagtggcacgatttcagctcactgcaacctccacctcccgggttcaagcaattctctgcctcagcctcctgagtagctgggattacaggcgcccgccagcacgcccagctaatttttttgtatttttagtagagagggggtttcaccatcttggccaggctggtctcaaactcctgacctggtgatccacccgcctcggcctcccaaagtgctggaattacaagcgtgagccatcacgtccagcctttttttttttttttttttttttttttgagacagagtctcactctgccaccaaggctggagtgcagtggcgcggtctcagctcaccacaacctccgcctcctagcttcgtgtgattctcctgcctcagccttctgagtagcgacgattacaggagcctgccaccacccctgactaatttctgtatttttagtagagacagggtttcaccatgttggccaggctggtctcgaactcctgaccccaggtgatccacccgcctcgcccggacaaagtgctgggattatcatgccagcctttatcattaatttttaagaaaacctggacgggcacggtggctcacacctgtagtcctagcactttgggaggccgaggcgggcggatcacctgaggtcaagagttagagaacagcctggccaacatggtgaaaccccgtctctactaaaatacaaaaaattagcctggcatgatggtgggtgcctataattccacctactcgggaggttgagacaggagaatcacttgaacccaggagatggtggttgtggtgagccaggatcacaccactgcactctggcctgggcggctgagcgagactccatatcaggaaaaaaaaaaagaaagaaagaaaaggaaaccataatcttcgcaaaatttctgcctatgtccctcccttctccccattgggcaggggtgggggcggggactccaccatgtaccttgcacgatcatagagcctactggaaggaagaacgtaaccattgcatgatttatttttgcgcttgccgtaggtaatacatatgttgttgcttttttgtttcttgagataataatgaattaaatattaacaccatgaatatgattaatagcatgtaattttttttcttttgctgttttttcccctgctcttctcttctcctgtttttgtgcttttcctgctttttctttgtccccttcacgtcccttccatctcttttcctttgcctgctcttccctgatttacccacaaccctaactttgcatattcaaagggggagatcctggtaagtacatgcttagtgtggtagcaaacattagagaatctagtggtgatggagaccccgcccacccctaatattccctgttccccatcccctccaaataacaaaaatactaaaaatcgagctaacctggaaaccccatgccgcagccggcgctggactgcacgttgccctgggtataagtcgactcacacaggcactaactggaccgccacccttgaaggcgcacttctgcagccagttcctggcaggttttcctggtttcctgtaggtcagggatggcaaatacttacacaccgcccctgcctcccctcacatccctggctgtggaagatctcgcttaagccagaccagaattcattcttggcactgcccctcctccttctatctcctatgcagatgtcactcatggatcagagcatatttttccacatggcagaaatcttgccctcttgtgcccatggcagacatggctagttgatctagcactctttgccttgtgccgctcctctagcacacgcccatggcagacattgctaagcaatcctagcattctttccaaataagcttgccagcactcctgttctatagcagatgtggctaagtgattaaggtattgtttttctccctatatgataccctcttctctatgcatggcaggcatgactagtcaatcaggagcctctttcctagatgctgcctcttgtcctccagataaattgatgaggctcttctgttccacttaccctttctcctatccttggcctgtgacaggcaacactaattgatcctagcaccgtttcctgccacgcccagaattctcaccacagtgcttcaggtatcttgtaccagtcgattgacatggctcccgagatgaatcatatttgctgtccatccctgctgtgggtaacacctccttcctttgtgcagaaccctcagctggggcccagtgtggggcgtgagatgggcgtgaggcccagtccagcccagcccagcgggaagcagcctgctactcatagctgagaactgaacccagctcaaggagctcacctctaggcagccggcctcagcccggctcttacacttggacagcacagcctgggcctccagtcctagcaggggctcccttttgctggacattctcccactgccagccaccaaggcgctggtcatccctgccactgccctctggcggggctcttctggcaatcccagggtctttcttgtagctgagccgatcctatgccagggcctcgctgctcccagggcctgggtgtgcagatagggccatgggtggggcagtgacgggaggaattagttggcctcgggcttgtggttttcaggttcctcatgtgttccccccagtccctttgaatttgccaggccaagaccaggaacctgcttctcccttgtaccccaagaggtttaggggttcctcttttcctaccagaggccacatagcccagccccgtcatgagcgtggccgtggcctctgggtctcccatctgtggttcccatctctacccgggagactcaggccaggaccctcacccaggaaagagactggagcagcctgccagaggatccctgctttgccgccccctgcctgccctgccacccataccgccccatgtgcctgcctgcctgtcactgtgcaccctagcccgcaacggcctgccgcctcttctgtctctcccacccctacttccttctaagcccagtcccattgggatgtgtcccttggatgcaaacctgactttctgctgaggcctggctgctccctttctctggctcacaagtggtggatggctaacgggcctttgtttgccacccacagcttgcagctccctagggtgggattttgtctctgaacccgtgtggagaagggcacctcagggcttctgccagacgtcctgccccaaggcttggtgtgccatccccagcatggccccgatcagtgccctggccctgtggccatgcaccccaaagtgtagcgtgggccctgtgctccagctctgaccaacactaaccccggctggaggcaggagagccaggccaccgaggggtgtgcgggcacatccctctccttagaaaccgggccaggcctaggagtatggaggcctcacatttctctgggggagcaccgacagcctgtctccctgttttccctcacctggttgtcattcagtcatggaaccagggtctactaagcactcgttctgtgcccagctctgggctgagacaaggcagtgcccccaccccgctccccccgggtgaatggaggcattcccagactgccagacctttggtgctaacaccaggacgtcctggacagaccaggaagagctcgtcactgcgttcccagaggggatgctgtgacctcacaggggctgctggcctcagccccctcacccaccaccaggcagcccgtgaatggccagatgccaggggtcactgcctgctccaaacaactgtgagagtcctgtctgctcatcccagggagggataagtctgtacccttggccttaacaaggggcgcccggtggcatctcatgctgtccccagcctgggcagtgacttctgcatggtccaggggtccctgggtactctttagccacctccgtcttcatggccacctggggcttagcactcacatccagccaccaaggagccgctggagctgtgggctggtggccctggttcagaatgtcaggcccggggtgggtcggggtagtccggatgaagcccctccagaggaccgcccccgactaggacagcatctgggccccagagggattcctggaggccccatctctggcgctcctgccgtgccgtgccctgccatgccctgcactgggggatgcaggccagcccttcgcagctgtccatggccatgctcagcccaccctttgtagcttggccaagtctgtcagtgcctgggtcccaggccgccctgtgcgtgcctccgtgtgcttcctgcagctcccagggccctcgtcctgagtggggtggggggctctgcccacacatgcctccagcggccagggagcatgggagcacagcccccaggctgcctgccgttagttgtcaggtgagtccctgcgcaggcctgggttctgacccccacgcagatgacagctacagccacacaatccccatccatggggtctcccagcctgaaaccctgatgtgtcagtcaaaaggatgaccaccaggcttgcagccagcttgggacatgagccgcgctccttcaatgtccttggggagggcccctgggctcacacctttgaccctagccctctgtgtggatgctacccttggaaccttatctcacgcaaacaagtgcagttcctcagatgtcacatttcatgtgccacagccccacacacaagccccagggactcctcccatgggcccctttccatcaggcctctgtgagtctataccccatcagcccctggcccagtgagtctgtctgtccgcccacctgcccaggtggcgcctcatgttggtttcctgctggaaatgcttgggacagggtggaactgggtttcctgggctttggggctggaggtgtctctattgcggtccctggcttcccactgagctgtgggcaaggctgctgcgctgggggatggctggggcacggagcgaggttccctgctaagctgcgcgctttcccccaggtgatccgcaggggctggctgaccatcaacaacatcagcctgatgaaaggcggctccaaggagtactggtttgtgctgactgccgagtcactgtcctggtacaaggatgaggaggtgagtggcaggcgggagcagggctgctggggtaggtggggcagccagggaagagcgggtgggcgctccctctgggcagaactcagtcactgcgccactctgccctgagtcaccattaggactgtaactcgccgggcacggtggctcccgcctgtaatcccagcactttgggagggcgaggcaggtagatcacgaggtcgggagtttgagaccagcctggccaacatgatgaaaccccgtctctactaaaattgcaaaaattagccaggagtggtggcacgcgcctgtaatcccagctactcaggaggctgaggcaggagaatcgtttgaacccgggaggcggaggttgcagtgagccgagattgcgccactgcactccagcctgggcgagagagcgagactccatctcaaaataaacaaacaaacaaacaaaaaacaaccgtaacccagggctggagagcagccaccatgtgccaaaaggcttacattgtacctggcccccatgggaccagctcctagagtgcaaaagggagatggagggtgatggagtcactagcaggctagaaacaggccctgacctccagtgccactgtgactgccccgtgctcaagagaaggggccatgcccaagggtcaggggctcaggcatgcagccagcctccaggggcaccggggttccatcacttacacctcagtcaggccccttgcctctctgggcctcagtttttctatctgcgaagtggtctaggatggtccctgcccactgtgcggtgcttggccacagtgtgcagaacgatccccacatgctcgtcattatgggaaggaagtggagaggcccctgggtgatgactgcagggagcagtgttgagtgctgagtcatgggagggactcgttcactgcgagtgagggggcaggccttgagcaaggatactgccaaccggcctctgctctccatgctgacccagcatccctcctgatggtcctatgtagaaaaagatacataatgtttgacatatttatggggtccctgtgatgttttattagatgtacagagtatgtaatgatcacggcagagtgtttgtggtgtctgtcactttggtattcctcattttcctgtgttcagaacagttcaggtcctctcttctgactactttgaaatacacaaggctgggcacggtgcctcaggcctataatcccagcactttgggaggctgaggtgggaggatggcctgagttcaggggttcaagaccagtttgagcaacatagcattaccctgtgtctattaaaacccaaaaaaaattagctgggcatggtggtgcatacctgtagtcccagctactcaggaggctgaggtgggagggtcacttgagcccaggagatggaggctgtggtgagctatgatcacaccactgcactccagcctgggccacagagcaagacactgtctcaaaaaaaaaaaaaaagaagaagaagaagaaatagacaatacgttgttgcattgttggctgggcacagtggctcatgcctgtaatcttagcactctgggaggctgaggtgggtggatcacctggggtcaggtattcaagaccagcctggccaaacggtgaagccccttctctactaaaaatgcaaaaattagccaggtgtggtggcgcacgcttgtaatcctagttacttggggggctgaggcaggagaatcaccggaacctgggaggtggaggtggagtttgcagggagccgagatggtgccactgaactccagcctgggcgacagagtgagagactccctctcaaaaataaaaacaggctgggcgcagtggctcacgccattaatcccagcactttgggaggccaaggcagacagatcacttgaggtcgggagttcgagaccagcctgaccaacatggagaaaccccgtctctactaaaaatacaaaattaatctggcgtggtggcgcatacctgtaatcccagctactcaggaggctgaggtgggagaatcgcttgaacctgggaagcagaggttgcggtgagccaaaattgcgccattgcactccagcctgggcaacaagagtgaaagtgtgtctcaaagaaaaaaaaacaccagacaattgttgttaactatagtcttaactgcagtcaccctactcttctgttgaacaatagaagttaatgccttttctctaactgtatgtttgtacccattaaccccacctctctttaccccctacttgtccccacctttcccagcctctagtatttatccttctactctccacctctgtgagatccgctcttctaccttttatttttttagctcccacgtatgagtgacaacatgcaagatctgtctttttgtgcctggcttatttcacttaacataatgacctccagttccattcatgttgctgcaaatgacaggatctcattcttttctatggccctgatcaacccgtttcttgcttaattctcttgacgtaaccatggcttagtggcctggaagggaagccacttctgtgtgatagcttgttgctactctgatgcggtccaggttggctttcaagagtccctggcaaagagagctgtgtttttctcattgtcctggttgctctgggagaagactgcaggctgtcctgtgagccatggctgtgttatgtgggcaatggatttgcgtctgtaacagaggcccaaaatgaaggctcttaaagagatgaagtctgtttcttgctcacgtctcagtgagcttggtgaccctgtgctgcaaggctgtccagggcctggctccgcgtctcctgttgccaccttaacacagggctcccttcatagtttaaaatggctgccccatacccatcaccatgtagcctctagcagcccaagaagggaaagaagggcctctgtgtgtgggaactgtgagtccagctaacagttctagcactttctaagaaggaagtggatattggttgtttctgagcgtgacagctggggcttgacacccggaagtcaccaggatattggttgggtggtgtcaacccttcgtgtctcgtctccccacctataaagtcaggactctggcctgtcccctctggactgcgggaaccagtgggggaattctggtacttgagcccaggactgtgcctggctcactgcatgtgtcccaggttttgtcctggtaactaccagcatcaagtcctcccagctcctctctgtaggagggaacctacccacctacccccagtgcacagaggaggagctggaggctgtgtcaggtgcagggccagctggccagtccccatggtccctgggatggcacagccaccaactcagtccaggcaacctcagtggagaggctggggttgcctgaggcccctggagccgccctgcctggctctcttccccttgggtttgggggaatgctctgtaggagtgccccccactggggacttgctggcacccaacccagccccaggataggcaggactgggcttggaagtcccagacttagagagaaggcaggctggggggccccggctggccccagggagaagcaaagagaggcgggcctcttggctatggacccctgctctgtgctgggctcattggctaagagagcccactgaggccacacctgaggagaaccctactccccgtgaggaaaccctcacgcttgctattcgggtggctctgtggtcacccccatctaaggctctgagcggtgacttgccccacatcatggagcgggggagggtccccctggggtggaggcttccccagtgcacgtctgcgggcccatgctccctgacctgagggacaccccagcccgacatccgaacacctccgctgcagcccaggcctgatgtccccttgactgaggacattgggggtgaaaggatcatcccgctccacatgaggccagacgctcatctctggaatgttcctgaaacctcaggagccctgaggcttctgcgggactctggggcgctgtttctaaacccagggtggtggagtctgctgagccaccatacaagcatttctggggtccctgtggaagcttccagaacctcagatccagcgaacctcatggggttgggatgtgggaggagtgtggagccaggcgtggtctgcagccttctccccgcctcaggcacctctaggaactcacgtgtccagatcggatggctcctcaaaatggctggggtggggtagggtgccctttctctttttctcccctctttccgccttgcagtgagaaaccagcctgcgctgtggtgtgtgggctgtcaggccggctgagagctggtgccctgcctttcagttcagggctgtggggaccttccagggtcccctgggtgggaatgccaggcctggggcagcgagccttggaggagcctctgggcctgaacctcagcctggcagctctctgcctggcagcattgcaagtctagttttcagatctcctcttccttcacgtgaggggcccttcgtgtttttctcatctgagagttgaaagccagagcccccgaccctcccgtggagccccacactggagtctggagcagcagtgggagaagggccgggcgccggccgtaatgagaaacagccgacctgtgaaaggggccctgtgtgagccccagacacaaagcaggctccattcaggagggggcagccatggaacctgacccccgccaccacccaagttaggatcccagcagggacccttggagtcacacacgtggcagccacccctgaggaggaggccaccctcttagatgcctcagtgagacacaagacatcaatatctctttatttaaaaaataaacaagacatttacagccatggggtggggatggcagactgatagggccagggcctccaacccctcggccggcctcggggctccctctgcctttccccagtgcctcttctcccacccaggccctcgaatcttctatgcgaggctctgccacagtgggaaacggggtggtggaaaatgacactcacctgccggcgagtttggggggcctgtctcgacgagccgctcacccaagcccagcctaaccaatgtgcagactactgtacacattgagagcctcctgaacaggtagtctgaacactgggttggcggggccggctatccatcctgcagaaccccccaggcagacgctggggccaccaggccaggccgtgcctcagcacctctgagcagccaaggaaaccaccactcttcccgagacgatccgctctgtcccttctgacgtggcaaggctggggccggctcgcatctggagaaagttctgggttttcaggaaatcctaaagagtgggggaggcggagcaggaggcagggtttgggatcgtggcttctgggctcaggaggaatgtctgactctttgggggtcgggggtggggaggaggggcgcacacacacgtgtgtgtgtgtgtgtgcgcgcgcgcgcacgcgtgcgtgccggcagcaccaggaaggcggccactgatttctcggcggaatcgcactgtaaacagttccagatgtggcattagctggaatggcctgtgactcagttacttggccctgctggctggaagcttccggccgcgtgatatgatagggtcagggcagcaaaggcccttgggcaaacgtccgagccgggggcagggcttctgcagagccccctcccctagccccttctaaagcccccaaaactcttccccgaaaggtgggagggacccaggccctgtgttacccagccttgcctgggatgacgggtgcaggctttcttcatcaccttccctcccttgggtccgcagcggcatccctccctccatggccaccgggcccctctcctatgctctgctccctccatggccaccgggcccctctcctatgctctgctccctccatggccaccgggcccctcttcctatgctctgccctacttctttgcctagagcctggcaggctaatcctggagccgctcacaagagcaaccaaagaaaatcccgggtgctcatgggcaccagctctgcagtgggcaccaagctcctccatcctccttggatagatgaggaaactgagatgaaatgggaggtggcggggaagtggcttgcccgagggcacacggccaggaaagggcagggctggcatcacctcaaccatgctgagctcctaacgccctgaggctgagcccatgtgccaagcccactgcttcatcctggctccccttgcaaagtcctgacagtcccagctggcccccacttgccagggagcccccgctgccttctccacagtcactgtggctgctcctgaacttggaggcggcagccaggttaggctttgtgctggggcagcgcagtgaggggacatgagaggagtttccagagacggcccagggagaagaagggccaggggcactgtggggaggactgggctttgggtcacagagacctggcctctgaagtcctgctgtggcttgcgctgcctgccgtgtggccttcggcagccagcttccctctctgagctaggagggatccgtgaactgagaccaagcagtgcatggcatgggtccccaagagctgctgctgtggcgggtgggcacacacatcactgggtgagtgtgggactccagggtgccacccccagctccgtgactcgccagccccttgcccctggccgaggggcccacctctgagctgcctccctagcagtctggacagccgtggctggcacttggtgcttcctgaacagggccaaccttagaaagcaagtgatagggcaggtgcggtggtgcacacctgtaatcccagcactctgggaggctcgcttgaacccaggagtttaagaccagcctgggcaacatagcgagaccccatctctattaaaataatgataatgataataataaagaaagggagtaaggcttctgcagcacctggcccaggacctatccagccccaagatgtcctaaagcggccaaggttgaaatcccagccctgctcctctctgcctcagtcttcccctctgtaaaatggcatcacagaggtaactcactcctaggctcgtttcaaagatggagcccagataaaagttccattcacttcgtgcaaggcgaggggcagttgtgttgtgcgtgccgtcagccacatgtcagcagtgaactcaacaggagtccctgccctggagaaacttgagtcagtccagtggcagtcagccacctaggtcaataagcacaggcagtcaggcacctaggtcaacaagcgcaggatacgtgacgtgttgtgtgagggaaaaggaggatggaggtggggagggtgcgggtagagttagggcaggagggagccatgcaagtgtcaggatcaggcagtagcccggtcgtccgaaggccctggggtaggaacccaggtgggatactcagggagcatcatggagggcagcgtggctgggacagagtgacggacggggaagggccggcagatgggctcatatacagcagcgaccagcattgagaagcccccggggctggtggtggcgcatgctacacgctctggcctggggcatcctgagttgtcacgtggaccgctcagggtgactcttttccctccaccctcaggagaaagagaagaagtacatgctgcctctggacaacctcaagatccgtgatgtggagaagggcttcatgtccaacaagcacgtcttcgccatcttcaacacggagcagaggtgaggggcccaggggcctggggatggctcggggtgaagaccaatggcctcattcacactccacaaccttcactgagcactgagcacctggctgtcagcagtccctgcccttgggacccagcttttagaaaggggagtcacgtgagaaatagcaaatgccagggatgcttcccgtgctgggtcagagatgacctctctgggcagagatgaggatgaaggcaggctccgagtcagtgggagccatggagagttctgagcacagggtgaccaggacctggctcaggtgcttgcaggagccctctggtggctgagagggaaacagtatgagagggtgagagatgggggacgagggcaaaggccgctgccttgtccaagtgggcgatgatggggccagaacccatagggaaggagggtgcagattctgggtagaagagtcaggcggagccctggtgggcatggatatgagagagaaaggcaccaattgtgaccctgagtacgtgggcctgagctcctgcactgcccagctgctgccattggccgaggtggggaaggcagcggcaggtaggcctggagacagccaagagctccatttaggccatgccaagggagagggtgcatcagggaggcacctgggtagatcgaggagtgtgatgtccaggaacgagctccagtctgggatgtgaactgggcagtcaccattgcgtggatggtatttcaaggaacgaaaccagatgagctcccaggagagtgaagctggagaatgggaggccccaggaagctcacagtacatctgtcccatgaggcgtagctggagactttagcagagacactgctctcaggaagaaacccagctggcaggagggctcttcccatgctcacacaatcacgctcatccaggaagcagggcccacctgagtcagggattagctgtcagtaaaggcccggtggtaccctgagacctgtaggcaggcactgacgtcctccctgctggccccagaacctccttgcctactgcttggctacacccaccaactccagctgagtctcctggttccctcctgctttgctctggctggcctaaagctcgagacccatttgtccaccagctggccgtgaaaaccttcatagctcttctaggcttgcccctggccatatgacacctggcagctgtcccaggtccctgagccgtgtgcctcctgtacagggagggtgacaatattatctgatatatcttttaagagcaggttcaggaaacccagagtagtagctgcaaaaacaagataagatggttgatagttttttgtgtaaattaagtccagactttagtatcccgggcaaagtggagcagctccacaggcatcagggtccaggccctgcatgttcctcaggattccacctgatatgcagaagccgagctctgcggtgggacaggcctgccatgaaatcctgactttttttttaaacggagttccgctgttgttgcccaggctagagtgcaatggtgcgatctcagctcaccgcaacctctgcctcctgggttcaagcgattctcctgcctcagcctcccaagtagctggaattacaggcatgcaccaccacgcctggctaattttttatttttagtagagacggggtttctccatattggtcaggctgggctcgaactcccaacctcaggtgatccacccacctcggcctcccaaagtgctgggattacaggtgtgagctactgcacctggcccaaaaccccgacttctacttctttgtccaaaatggctgcccagactccagccattgtgatgatgtcccaggcagcagcaggaaggagaggaggagctacaagggcatgcctctccccacacaacctcatccagaggtcgttcggggcagccacttgctgaccacaaacccaactctcacttaaaggctttgtgggcagcttggctgtcttaaccacacctggatgtgggacaggaaaatgtgcgtggcatgtggcacggggcctggcctgtagaccaccatctgcaagcactgtttagcatccattccatttatctcccagctttgagaccctggttcttttttctttttctttttcttttttttttttttttgagatggagtcttcctctgtcacccacccaggctggagtgcagtggcatgatctcagctcattgtagcctccacctcccatgctcaagtgatcctcccgcctcggcctcccgagtagctgggactacaggcgcacaccaccatgcccagctaatttttgtattttctgtagagatgggggtgttgctgtgttgctcaggctggtctccaactcctgagctcaagcaatccccctgtctcagcctcccaaagtgcaggaattacaggtatgagccaccatgcctaaactttacaaaaatttttttgttttgttttgatacatagtctcactctgtcgcccaggctggagacagtggcacaatcttggctcactgcaacttccacctcccaggtttaagcgattctcctgcctcagcctcccgagtagctgggattacaggcatgcagtaccactcccagctaattttttgtattttagtattgacggggtttcaccatgttggccaggctggtctcaaactcctgacctcagttgatcctcctgcctcagcttcccaaagtgttgggattacaggcgtgagccactgtgcccagccaaaactttttttataaaaaacacacaggccgggcacgggggctcacgcctgtaatcccagcactttgggaggccgaggcaggtaggtcacgaggtcagaagatcgagatcatcctggcgaacacggtgaaaccccgtctctactaaaaatgcaaaaaattagctggggtggtggcaggtgcctgtagtcccagctactcgggaggctgaggcaggagaatggtgtgaacccgggaggcggagcttgcagtgagccaagatcgcgccactgcactccagcctgggcgacagagcaagactctgtctcaaaaacaaaacaaaacacattcgggcacagtggctcacacctgtaatctcagaactttgggaagccgaggtgggcggatcagctgaggtcaggagttcgagaccagcctgaccaacatggagaaaccccatctctactaaaaatactaaaattagccaggtgtggtggcgcatgcctgtaatcccagctactcgggaggctgaggcaggagaatcgcttgaacccgaaaggtggaggttgcggtgagccgagattgcgccattgcactccagcctggacaacaaaagcgaaactccgtctcaaaaaaaaaaaataaataataataataataataaagttctggtggacagtgctgctctgggctttcctgaaaatgccccagtgggagcttcccagccacagttggtgtcgagggtcacatgcccacctctgggggcccaggaaaagagaagagtcagctgatccaacagaaacaaagaaactcagacacttgccgagcttgtgcacagcgctcttctgtgtaggcgtcactcacggtgacccctcagcatgaccaggtgaagcctgggttgggtttgggttcctgatcagtcagaaagacccctagagcccattcctctcggcagtctgccagacccatggcagggtcaagcttgtgcccctccttccccacccccccgcagaaacgtctacaaggacctgcggcagatcgagctggcctgtgactcccaggaagacgtggacagctggaaggcctcgttcctccgagctggcgtctaccccgagaaggaccaggtgaggagccgtcctgcgcagccaggcccagagcccccacctgggagaggaagcagggctggctttccccaggacaggtcattttcaggccatgttagccaggagtctctgaaatcatgtagcagatgcccacttgagcaagcaaaggagaaattgggggtactttgtcatcagggcccagaaagttccctcacggaagccagtgaccggggcacacaggggatggggtcccacttgctttgttctcttctcttttccccttccatcctgaggtagagtgaacatggccacccttggccccaatattaaaatgccttgccgggcacggtgggtggttcgcccctgtaatcccagcactttgggaggctgaggtgggcagatcatttgagctcaggggttcgaaaccagcctggccaacatggtgaaaccccgtctctactaaaactacaaaaattagccaggcatggtggtacgtgcctgtaatcccagttactcaggaggcttaggcaggagatcgcttaaacccgggaggtagaggttgcagtgagctgagatcacgccattgcactccagcctgggcgacagagcaagactccatctcaaaaataaaataaaatgtcccaaggttgggtgtggtggcttacacctgcaatcccaacactttgggaggcaatgtgggcagatcctttgggcccaggagttcgaaaacagcctgggcaatgttgcaaaacccttctctccaaaaaatacaaacatacccaggcatggtggcgcacccctgtaatcccatctactccagggcgctgaggtgggaggatcacttgagctctccctgggaggttgaggctgcggtgaactgtgtttgtgccactgcactgcagcctgggtgacatagcaagactgtgtcaaaaaaaaacaaaacaaaaaaacaacgttccaatgcccaggtgaggggatccaccccagcatcagccagggtcaccccattgtttgggcagctctggcccagggcaagcaggcctatctggtgccagtggggctgtcaggggccagcctgaggtcagttattggtgggacaatagggcagatggtttccagagaaccaggacttggcccaggccacagtcacccctcagcacctcccctcccgcttgcaggcagaaaacgaggatggggcccaggagaacaccttctccatggacccccaactggagcggcaggtggagaccattcgcaacctggtggactcatacgtggccatcatcaacaagtccatccgcgacctcatgccaaagaccatcatgcacctcatgatcaacaatgtgagtggagaactaaaaatgagaaggaggtagctgggtgcggtggctcacgcctgtaatcccagcactttgggaggccaaggcgggcggatcacttgaggtcaggagttcaagaccagcctggccaaaacggtgaaaccccatctctactaaaaatacaaaaattaggctgggcgcggtggctcacacctgtaatcccagcactttgcgaggccaaggcgggcggatcacgagctaaggagttcgagactagactgaccaacatggtgaaaccccatctctactaaatatacaaaaattagccgggcacggtagctcacgcctgtaatcccagctactcaggaggctgaggcaggggaatcgcttgaacccaagaggcagaggttgtggtaagcctagagtgcaccactgcactccagcctgggcgacagagtgagactccgtctcaagaaaagagagagagagagagagaaaaatacaaaaagtagccgggcatggtggcgggtgcctgtaatccagctacccgggaagctgaggcaggacaattacttgaacctgggagatggagatggcagtgagccaagatcgtgccactgcactccagcctggttgacagagcgagactccatctcaaaaaaaaaaaaaaaaaaaaatgagaaggaggccaggcaccctaggccatacctgtttgtagtcttagcactttgggaggctgaggcaggaggatcacttgagcccaggaggttgaggctgcagtgagctatgatcatgccactgcactccagcctgggcgacagagcaagaccttgtgtccaacaacagcaacaacaaatttgaatgaatcaccaccctttgaacaccagaatctgcacggccatcctctttgggaaaccctagggtttccgagccacactgggtccatagtcccatcaagtccactaactggagtgaacactgcaggtgtgcgccttctctgaattaacttaggctggcatcagaataactgcaggagggagaacggccatcttccccatttcacagacagaaaacaaggccagagagatcaagtaacctgccccaagttccttaggaaagtgggaagtgggattcaaacccacgtttaccctggttgcaaccatacccttgggttgtgttgggcagccgctgtgtcctaatgatctggggcccagcctcttcctcatgggcgtcacccgcctggccccgggttccctggagactctcagggctctgggctcctcttcagtgaaatgcagctgtactgatagtatctccagctcaggctgctagagggctcagggcacttgtgtatcaggcctttggcatggcactagccactcaggaagctttataaaccagctttggggccggagcagtggctcatgcctgtaatcccagcactttgggaggctgaggagggaggatcacttgagcccaggagctgaagaccagcctgggcaacatagccataccccagtctctacaaaaaatttaaaaattagctgggcgtggtggcaaatgcctgtagtcccagctactcagaagaccgaggtaagagcatcacttgagcccaggaggttgaggctgcagtgagccatgattacgccactgctctccagcctgggtgatggagcaggaacctctttcaaaaaaaaagtgtcttgggttttgtatatgaatgtcaaccacagaaacctgcggatctaagtaaaactcccacacagggtgtggctgggcatggtggctcacatctgtactcccagcactttgggaggcttggcaggaggatcactcgatcccaggagttcaagaccagcctggacaacatagtgagaccccatccctatttaaaacacacacacacctcccacgtgccatgccctcccaccctgttgctcccattctcagtagtgatcagtgttcacagtttcatggtgtcctggtatgtttcctcatataccgataggatcggagacatatacggttcttctgctatgaaatttaaaatgcatatatcctttgaccctgcaagtttacttttaggaacttctctaagagagacaattgcccacgtgcaaagtgagcttatacatgcttattgttttccatgatgttttatagcagccaaagatgggacataattatccatttttaatagactcttataaaataaaaatattttattatttaagaaaataataaatctgtcggcccagctactcgggaagctgaggcaggaagatcacttgagcccaggagatcgaggctgcggtgagcaaagatcgctccactgcattccagcctgagtgataggagtgagaccctatctaaaaaaaaaaaaagttgtgacggccaggtgtggtggctcatgcctgtaatcccagcactttgggaggctgaggcgggcacatcacgaggtcaagagactgagaccatcctggccaacatgctgaaacccccctctactaaaaatacaaaaattagctgggcgtggtggcacgcgtctgtagtcccagctactctggaggctgaggcaggagaatcacttgaacctaggaggtggagtttgcaatgagcggagatcatgccactgtactccagcctggtgacagagggagactctgtctcaaaaaaaaagaaaaaaaaaagtaactgaaaaacttctgtatccagtaggaggttccagaaaggacaatgtataaaattcatgaacagaaactagtagtgtttgaacagaagccaggtggaagatgtaacaggattagccgggcgcagtggctcactcacgcctgtaatcccagcactttgggaggccaaggcgggtggatcacctgaggtcaggagttaaagaccagcctggccaatatggtgaaaccccatctctgctaaaaatacaaaaattagccgggggttggggggcacgcctgtagtcccagctacttgggaggttgaggcacaagaattgcttggacccaggagacgcaggttgcagtgagccaagattgcactgcagcctgggtgacagagtgagactctgtcacaaaaaaataaagatataacaggattggctgggcgcggtggctcacgcctgtaatcccagcactttgggaggctgaggcaggcggatcataaggtcaggagatcgagaccatcctggctaacagggtgaaaccctgtctctactaaaaatacaaaaaataagctgggcgtggtggcaggcgcctgtagtcccagctacttgggagactgaggcaggagaatggcataaacccgggaggcggaggttgcagtgagctgagattgcaccactgcactccaacctgggcgacagtgagactgtctcaaaaaaaaaaaagcaaaaacaaaaaagatataacaggattattctgccaaggttaaggaaataaataaataagctaaaacaggagaaaagacatcaatggaagaggcaagatactagaaataagttgaataagaatctcataaccagcctgggccacatggtggaaccctatctctaaaaaaattacaaaacttagccaagcatggtgtcaacgtgcctgtcgtcctagctacttgggaggctgaggcaggataattacttgaacccgggaggcggaggttgcagtgagctgaaattgagccactgtactccagcctgggtgacagagcaagactctttttcaaaaaagtctgggggtggccccgccctgtgagagatgtttttccagcagtcactgtgggttctgggttggggtgatacacaagcctgaccctccccaacccctgcccgcagacgaaggccttcatccaccacgagctgctggcctacctatactcctcggcagaccagagcagcctcatggaggagtcggctgaccaggcacagcggcgggacgacatgctgcgcatgtaccatgccctcaaggaggcgctcaacatcatcggtgacatcagcaccagcactgtgtccacgcctgtacccccgcctgtcgatgacacctggctccagagcgccagcagccacaggtccggaagcctggttcccctaccctcaagcattcggcctgcaggttcctgccctccctgtgtgtcctgcagggtcctggcaggaaacaggacacagcccaagggtggcacccagggctgggcactgtgggagctgctgccctgctgaggccggaggagggagagaaggggtatgggggcgagccagccctacagctctagggcaggaccctgtgaataaataccccgcctgccctctgctggtgccttccattggcacagcccaaatggaagctggggtaagaggctggaggggcagcagccacaggagagagatgagcctcctggagcacagagaagggcagatgggaggctctggaggggcaaacgcaaggcgtggccagagctgctgccgcccctgagttgtccattgaggccgtcgggcagggaacctcagagggggctgccttgcagagccctgggggagccatggagttccttaaggggaggatatcgcacccaggcctgcaggtggcagggactgaggcccaggagggaatctggatgtctggacagggcttgcaggttccacggcccctagagatattagggcttgatctggaggactctggaagtgtctttggctgtgagggtggatcccaggcccaaggcctgagggggccctgtgagtgggaagtgcctgagggggccgagggcaagggaaggtgggactggcgctcaggttggggtgggaggatcccactgcgcctgcgctgtccccatagccagcccccacctcaggttctggcagccacagtggcatggcgggggctcctactccatctgtatctgtagctcacaccctctccttcctcacagccccactccacagcgccgaccggtgtccagcatacacccccctggccggcccccagcagtgaggggccccactccagggccccccctgattcctgttcccgtgggggcagcagcctccttctcggcgcccccaatcccatcccggcctggaccccagagcgtgtttgccaacagtgacctcttcccagccccgcctcagatcccatctcggccagttcggatccccccagggattcccccaggagtgcccaggtaaggccaaccccctgccctccaccccaactgcctgcaccctggggtctctcctcctgtctcacttcctcccagtgagctctcactacgtgcccagctgctggagtggaggaatcgtcctcatccctatttggcttgcgaggaaacaggcccagagaggccaagaggcttgttcagtgtcacagagtagcggagccctggtgactccggggctcccagcttgccctctgcctactggggtgtgccaccaggcagctggggaaccctcacactgggcacctcctcccactgtttaccttcttctccttcctgctcctgcctgcctcaacctaccgtgggccaggctttattctccccacttctccggtggggaagctgaggcccagggagggcagggggctcactgagggtcaaacagcaggcgagttgatgcctaggtttggcactcctgcccgacaccctggtggcttgcggaggtcagcctgggaacaccctggggtggtgtgtgggtgggggctgggtcctcaacccaggcctgcctcttgctcccggcctcactgccgtctccccctccccacctgtctttattctctttgcagcagaagaccccctgctgcgcccagccggcccaccattatccgcccagccgagccatccctgctcgactaggcctcgaggggggcgtgctctcgggggggcctcacgcacccgcggcgcaggagcttcagtggtctggggccctccgccgcccctatgctgggaccaggctcccagtgggcagccctggcctcttccttaacgctggccccggtccagggccggcccctgtgcctggctggacaccgcactgcgcaaaggggccctggagctccaggcagggggcgctggggtgttgcactttgggggatggagtctcagggtggcagaggggggaccagaacccttgacaccatcctgaatgaggggtccagcctgggggggactctaccaaggtcttcttgggctgggaaagcccatgtagggcaggccttctataagtgcgggcaccaagggcgcctacatccccaggccttgctggggtgcaggggtatatcaacttcccattagcaggagctccccagcggcaagcctggcccagtgggctcggtagtgcccagctggcaggcctgaggtgtacatagtccttcccggccatattaaccacacagcctgagcctggcccagcctcggctgccagaggtgcctttgctaggcccggagccgttggcccgggccggccttgccctattcctctcctcctcctcctcctgggtcccccagggtggctgggcttgggctatgtgggtggtggtggcggggggtcttgggggcctctcagctcccgcccatgcctccctgatgggtgggcccagggcggcctctctctgaggagacctcacccactcctcgctcagtttgaccactgtaagtgcctgcactctgtattctattaataaactaaaataaagggaagacgctgctggtggctgctgtgtgggcctcttgtgttagtgttcaggctggggacatgggtgccacctccatcaggcctcccataaggatgcccaagtccctgcactcataagtgcctcccatctccctgagggctctgctttcgggggtgtcacctttcagaggaagccactcgatacaggggagagcttttactttccttagcatgtgaggagtgggagcagatattctctgaccccctgcacacccccacgtgcacaggcctggctgctgcctggtgaagcggggaccccagcgctccacccccttcctaccctcaggccctgcttctctcacctcgtggggaagcccaagcctcgtggcccaactggggctcagttaaactttgctttctgatttttctcttgtgccaggcgaccacctccatcggctcccgcacgacctttcttctgagcttcgtgggaggcccctcccacctgtctggctgccccctcgggggccggtctgtcctggctggtgtccctgagccccaatcagcaggctcttgtgattttctgaccataatttattgactccaatgcccaggccacaccaccctttgttataggaggcttctgcctagactttggccgggccatccctcatgcctgtgtggggcccctgcaggagaggggccggggcaggtggtcttccaggcccccttcctggcattctgttaccagacctcaacctggcttggagggcccaggtttccttgttaggccctgccccgcaccaggcaacgctaacacaggatgggaggcttaggctaaggcacatttacagtagaggggccaggaaatccgaggctcacgttccaacgctgcagtgcccaccatgtgagatttccaggaccgtcggtgcagccactgagccgtcccttctacaagccagaggtgttccctgcccgctgaggacggaaggagactcatggggccagaccgcaggccctgactgcacactcccgttttggcaggaaactaaaattggggagggacccccaagtctcatatgcacacaccctgctgcccctcctttgtcccgttcttccttccatggcaggggctacgtgggcaccgggcgcttgtcctggaagaagcgcttgagcgtgcagacctgcagcacagccaccagcagcagcaccgccacgttgacagctgaccagaagttgacccgctccaagttgccctcttgcaggttgcggtcacgtgcctcgaaggcccgcagtagcgtgagcatctggatgctgcgctccagccgggtccgcatggtctcaatggactcctacagggcagcgggaggggaagggtcaggcctccctccacccatcagggagcagagaccaaaaaaaccgggggatacggagggaggctgtattaaccctgggaggtacagctgcaaacacagacttgttcaggctaagttcaaatcctcaccctgccactcactggctgtgaccatgagcaacttaattaacctatctgagcctgtttcctcttctataagcttccaaattgctgtgaacatttaatgcctaaataaatgtacaaggatgagcatggtggctcatgcctataatcctagcactttggaaggctgaggtgggaggatcgcttgagcccaggagtttgagaccagcctgggctacatggcaaaaccccatctctacaaaaaattagccaggggtggtgatgtgcaactgcaatcccagctactcaggaggctgaagcaagattacacctgtaatccaaacacaggaggatcacttaaacccaggagttcaagaccaccctagccaacatggtgaaacctcgtctctacagaaaacaaaaaattaggcatggtggtgcacacccgtagtcccactgaggtggcaggattgcttgagcccaggagtttgaggctgcaatgggctatgatcacaccactgcactccagcctgagtgacacagcaagaccttgcctcgccgtagctcacacctgtaatcccagagctttgggaagccaaggcagacagatcccctgaggtcaggagttcgagaccagcctggccaacatggtgaaaccctgtctctactaaaaatacaaaaattagtcagtcaggcgtggtggcacagctattcaggaggctgaggcaggagaattggctgaacctgggaggcagaggttgcagtgagctgagatcgtgccactgcaatccagcctgggtgaccaagagagatctgttagaaaataaataaataagtagttaattaaaatactaataaatgtacagaacatatttgcttgtggttaagagcatagttgctgaaaccagcatgggttcaataccaactctgctagttggtctgtgtggccgtgagttgctcagccatcttgtatctcactttctccacctgtaaaatggggatgacttgagcacagggtctgcttcacaaggtggtttggagatttacggtatgagttatttatgatatgagttccttaaacctttacaccagggtttatacctagaaatgaactacttttttttttttttttttttttgagacggagttttgctcttattgcccaggctggagtgcaatggtgcgatctcggctcactgcaacctctgcctcccaggttcaacttccacctcctgggttcaagtcattctctggcctcagcctcctgagtagctgggattacagacgcccgccaccacacccggctaatttttgtatttttagtagagacggggtttcaccatgttggccaggctggtctcaaaactcctgacctcaggtgatccacccgcctcagcctcccaaagtgctgggattacaggcgtgagccaccgtgcccggcctgaaatgaactacttattttaagagctgctactcttactataattcagttggagggcacaactacggaggggaggctgggtcagcccaaggggggcaccccaggtgaatcctagagatctggaaggagtggccccagcgcagcctggacacaccttgatgtcctccattttaacatccagcatctcctcgggctccacagcctctgcccatccttcgacctcctcgtcatcctggaggctgtcaaagatcagttcaaagaacaccagcttctcggagatggtgctgaaggagttgtcaaagcacagcttgtagtccccggcctccgttggctccaccctgggcagacagacacacagacatgacccagggtggccagccagccgactcagcggggcagtcagggcggtaacctgaggccgcctgggaagggcagggctgtaactgaacccaggcaggcatcaagactgaactcacgtgtgtaccccatcagccttgcgggactcgctgaccaacagcacgccctgagggctctccagcgtgaagtccacgtccagtccagcacctccgatcacctggggggcaggtaagagcgggtggagggctagcggtaggccaagggcgcctgccgaagagggctacggctgaaccaacactgatcaatacagaccaccaagggcttacctgaacggcggcacacccacacccgccccaacctgtcccagtggctgcgccccttgcctccaccctcattgatatgacagcttggggtccatactttcagctgaccacgcacctaccaaaagtacttaatggacgtttacctgaccacgcccctggttggctccgcctccgaaagaggataggcccagcctttttccttagtctaacccccgagaaaggcctgtgtgggcaacgcccccgcagttgacctatcagcactatcgccacgcccaccagccagagtcctgtcctctcagaggctccctatacttatcgatggccccgccccctctggatctcttactctagccccgcctgcttcattactccctccccttccgctcccacacaccgtccccgccccatctgtccatctctttctagctccgcccccgcgctcccaagcacggattcctcccccttcctcctaaagcgcgcctcgcctcgaccgcttggccacgccccctctccctgactctgctggccgcccagcccgcgaccctctacctggtattcggtctcgaggcttgcgttggccggcgcggactggtagaaacactgcttcctccccgccggcaacaggaacgtgaactcaccgtcctggattggcgggggccccgcccctcccacctccactggtggcattagtagccacaaggccagggctagggccgcgccggccgccatcatccgggtcaccctctggtctgcaaaggggtcgcggctcctttaagcgctagccctgccccggtgctactcggcggagctcattggcagtggcttctgtatgttgtccgtaaccagaggtgccaggagtgaaggacccccccactagagggcaggcggcccgaatgaatgcctgatgtgcccagaaacactcaaccgtctgggaatatttttctcaaaggcttcggctctcttctcggccgctggtggaggaaaattacaaaaataagtgccatgatggcgcatcttttgtaggcagtagctaagacaactaaagttacaggcggcagggtcctttttagtcacctccacgtggttttcccagagtgcgccgcgcgtgacaacctttggcgggaccgacgtggtggagtggacccaaaaatagcgtctaggcgtggccctgtacgcgacccgtagggctcgcctataaaagggctggggcggggcggagatacctgtggcgtcgtgttttgcttgctctgtgagcgtggtccaggttcgacgccttttgcgccttagaggcatcagcgtatcagtttcctcgtaagtcgggagtgatggaacgaccaccctgtagtgcggctgtgagaattgagatgaggcttggttcatattgagtgctcagctttcctggcttatagacagtggaggggcgtggccccaccatgcaccccaagggtctcagactcaagggccagcaggtaaatagagccattacagtagcctcgggtcagaaaaacgacagcccaggtaggaagagataaggacagtgtgggactgggagccacgttgcctggttcagctcctgccccacccattacttgaggcattccctctgttgagcctcagtttcctcttctgcaaaatggggataataggcctacgctactgggctgtctttaggatacgtgaaatgcttgttgagtgcttgcttccgcagtgcgtgggacatcacaggccctcagtaaataataatctgttatttggttcccgtctaaacataaactgtgtacagggagatgtttagtcttcaaagataaacccggaaaaggttggcaggtgatgacaaagatccctcaaatacagctggctgttgtcagcactttcctgcatttggagaatttggggaagtagctctttgtaatatcagtttggtattccttttcactccaactttttctatcatttacactcactgcttggacaatttgaagtaacagtggagaacgggtgactccttttcttttttttctttttttttttaatttttttttcctttttttttttttttttttttgagacagagtctccctctgttgcccaggctagagtgcagtggcgcgatctcgactcactgcaacctccgtctcctggggttccagcgatcctcctgcctcagccttccgagtagctgagactacaggcacgtgccaccacacctggctaattttttgtatttttagtagagagggggtttcaccatgttagccaggatggtctcgatatcctgaccttctgttccatccacctcggcctcccaaagtgctgggattgtaggcgtgagccactgcacccggccggattttttttaggacagggtcttgctctgttgcccaggctggggtgcagtgacgccatcatggctcactgcaatctctacctcctgggctcaagtgattctcccacctcagcctcctgagtagctgggactacaggtgtacacctccatgcctaactaattttttgtagacatgaggtttccctgtgttgcccaggctggtttcaaactcctgggctcaagccatctgcctgctccctcaccctcccaaagtgttgggattactaaaattgatttttttaaatacagtaaaattcacattgcataaaattaacaattttaaggccgggtgtggtggcttacacctgtaatcccaacacttttggaggccaaggcaggcggatcatgaggtcaggagatcgagactatcctggctaacacagtgaaaccccgtctctaccaaaaatacaaaaaattagccaggcgtggtggcgggtgcctgtagtcccagctactctggaggctgaggcaggagaatggtgtgaacctgggaagcggagcttgcagtgagcccagatgatgccactgcactccagcctgggcgacagagcaggactccgtgtcaaaaagaaaataaaaataaccattttaaaattaacaattcagtggcatttagtacattccagtgttgtgcagtgacttctatgtagttccaaaacattttcatcggctcagtaaagatccctgtacccattaagcagtgattctgaaacggcctcgttgtcttgagtaacacccggggtcgttgtctcacagccacgaagaacaaggaccaggacacacaaaagaatgaggttgagaacgaacgtttaataggcaacggagagtatagctctctgctacagagaggagtcccagaaaaatgggttgctggtccatagcaaaatacaggggggtttatagatgagctggtgaggagacttagcctgatttacataggggatgaaaaactggttagaacaggtgtgccatttgcatagggtgtgaatttctggtatctgctaatcttttattatgcagccggggtctctacctgagctgtgccacatcgcccatttctttttctttttttttcttttttttttttgagacagagtcttgccctgtcacccaggctggagtgcagtggcgtgacctaggctctccgcaacctccgcctcccaggttcaagggattctcccgcctcagtagctgggattacaggtgcctgccaccacgcccaactaattttttgtatttttagtagagacaggatttcaccatgttgtccaggctgatcttgaactcctgacctcatgatccgcccaccttggcctcccaaagtgctgggattactggtgtgagccaccttgaccagccccatgttgcccatttcttagttcctgtacacgtggtagcaaaaaaggggagatggagcctccgtgttggatatgcctggctcccaggtagccattttctgttggtgcagctgccagcattcccacgtgcaagcttccagcttccttatctatgtttgcagcttgagttttcaggctgctatttattagaaaagaaatgatatcaggggctactttctgttagaaaagaaattctgctgaggactctttgccctcactgcctgcctaaatactttctatctcctgtatcaactcctcattacactttgccccccgcctctcaactagctatgtgctttttgcctctagggatttacctactctggatatttcatatgaatagaagcagacaatgtgtcaccatttgtattgaacttcttttacttagcatgtttctagggttagaccatgtatcaatatttaattcctttttatggctgagtagtattctattgtatgtacataccacaatcaatttttcttttgttctttttttttttttttttgagacagtctcgctgtgttactcaagctggagtgcagtggtgtgatcacagctcaccgcaccctccacttcccgaactcatgtgatccacctcagcctcccaagtagctgggactacaggtgcacgccaccacacctggctaattatttttctgtggagacaagaggtctccctgtgttacccagactggtctttaactcctgggcttaagtgattctcctgcctcagtgcccaaagcgctgagattacagttgtgagtcactgtgcctggccccacaatttctttagccattcattattgagggacagtagagttatttcaaccttttagctattgtgagtacagctgctgttaacatgtatgtatgtgtattttattacttgcgttcagttctttggggtatagatctcgtggtggaattgctggatcctatggtatttctatgtttaactttttgaggaacaaccaaagtgttttccacagtggctgtactgttttccattcccaccaaccacgtatgagggttccagtttctctacatcctcaccaacacttgttactttgcattttgttttttgttttgttttgtttttgagacagtctcactccttcactttggctggagtgcagtaactgcaatctccatctcccaagttcaagtaattctcctgcctcagcctcccaagtagctgggattacaggcacatgccaacacacccagctaatttttgtaattataataaagacagatttttgtttttgtttttgtttttgttttgttttgttttgagacggagtcttgctgtattgccaggctggagtacagtggtaccatcttggctcacttcaacctctgcctcccaggttcaagtgattcttctgcctcagcctcctgagtaggtgggactatgggcgcatgccaccatgcccagctaatttttgtatttttagtagagacgtggtttcaccatgttggccaggatggtctcaatctcttgacctcgtgatctgcctgcctcagcctcccaaagttctgggattacaggcgtaagccaccgcgcccagcctagagacaggtttttgccatgttgaccaagctggtctcgaactcctgacctcaagtgatctgcccacctcggcctcctaaagtgctgggattacaggcgtgggccactgtgaccggccctgttttgtattttttgtttgtttgtttgtttgtttattatagccaacctagtgtatgtgcatttcccaaatgattagtaaggttgagcatcttcttatctgcttctcggtggtgtgtatatcttctttggaaaggtatccattcatgtcttttgcccatttaaaaattgggttgttcatctttttgttgtaggaggttttttaaacacatattatagagaggaaaagatagaaaagtgaaacaaaaaaacttctctagctggaccctcatgcttgtaatcccagcactttggaaggctgaagccagaggatctcttgagccaaggagtttgagaccagccttggcaacgtagagagactctcccgctcctaccaccatctttacaaaataataaaatattagccagttgtggtggcatgcacctatagtcctagctactcaggaggcagaggtgggaggctcgcttgagcccaggagttcaaggctgcagtgagccatgattggcccactacactccagcctgggtgacagtgagaccctgtctcataaacacacacaaaaaaataccctctcgcggccgggcacagtggctcacgcctgtaatcccagcactttgggaggccgaggtgggtagatcacaaggtcaggagatcgagaccatgtcccttgagtaaacaaaaccaaaaactctcctccctaattattcaccaaatatttactgagcctctgacagtgaataaaacagacactgtcaaagccaggtggagtggctcacgcctgtaatcccagcattttgggcggccaagttgggaggatctcttgagcccaggagttcccgactagcctgggcagcatagtgagatcccatctccacaaaaacattttttaaaaaattagctgggcatgggaacaatcccatttcctgagggaatgggaggatctgtctacttttcttatcctgattcaaatggaatgccagtgtggcaactcctaggatttgtcacgaatgggaagccaagtgccatcttcaaaatttcaggtcttaaatctggagaaggaagccaacatccttttggagccatgaatattgtccgaactccatctgttgctcagattggaatttcagtggaattattggacagtatggctcagcagactcccgtaggtaatgctgctgtatcctcagttgactcattcactcaggcccagatgacaccaagcccatctgaaatgttcattccggcaaatgtggttctgaaatggtatgaaaactttcagtgatgactaccacagaaccatctcttggaaaacataatttgaataaaatacttttttttttttttgagacggagtctcactctgtcacccaggctggagtgcagtggcgcgaccttggctcactgcaagctccgcctcccgggttcacaccattctcctgcctcagcctcccgagtagctgggactacaggtgcccgccaccatgcctggctaattttttgtatttttagtagagatgggttttcaccgtgttagtcaggatggtcttgttctcctgacctcgtgatccgtcggccttggcctcccaaagtgctgggattacaggcgtgagccactgcgcctggctaaaataatttttaatggaaaaaaaaaaagtagctgggcatggtggcacacgcctgtagtcccagcaacacaggaacctgactcaggaggatcgcttgagcccaggaggttgaggctgcagtgagccatgattgcactactgcactccaacctgtgcaacagagagagaccctgtctcaaaaaaaaaaaccagaattccaggttgtagattccttcaccatattgactcaggatttttcttagccactttgccagccggggacatctatggccggcagtgccccctaccacccgcaagggcatgacactggaggcaccctgcccactcagcccacctgtgttatagcttgtatctgcattcggcagttctcaagctcttgtcctgcatccaagaagaatgaggaaatgctgacaattgaagggtgaagatgggaggagaatttttttgagcgacagaacagctctcagcaaagaggagatgtgggggtgtggtttatctttcagtgtggctggatccggggctttttatggactcagaatggggaatgtgtgctgattggattgtgagtgtgcaaaaaaggttaaagcgaagacaccactcaaaggtgggtccaacagtatagaaaaccaattaggaaagggtaggtatatgcaaactaggtggagggtggggatcaatctgaggaaagcacgccaaatagaagacagattctctgtccagtccctggatttgacttgtagctttgctttcaggctttaaactgtctttggcttggaggtggggtttcaccagggacctgcccctatctgcctaggcatttgtctgcctcttgccactatcaatatcaatcagaaggcttccctgaccctgctgtagctgggttgagccccctcggccactgcctctgttactgcacttcaccactggactctccttgtcttcttgtctgactcttgaacgctgagctccttgaggacaggagccattttcattcatcctaatgtctctggcacaattctgggaacatgatgatgctcagtactcagttggtggaaaaaataagccaggaatctctcttaactccatctcctgtacacccagtatacagccacagaagtggcttgaatggatgttttttttcgctgtcaggtcagatgattgagaaatatttatgatgtgccaagcatggtgggagacacgggacactgcaggtaacaacacagaccccatccttgtgctccgagaggaggaggaaagctgtgttaagatatcatgaaggctgggcatggcggctcatgcctataattccaacacttcgggaggtgggcggatcattcgaggtcaggagttcaaaaccagattggccaacatggtgaaatcctgtctctactaaaaatccaaaaattagccagccgtagtggtgcatgcctgtaatcccagctactcaggaggctgaggcaggagaatcacttaaacccggaagatggaggttgcagtgcagccgagattgcgccactgcactccagccggggcgacaaagtgagaccatgtctaaaaaaaaaaaaggctggacacggtggctcacgcctgtaatcccagcactttgggaggctgaggtgggtagattacgaggtcaggagttcaagaccagcctgaccaacatggtgaaaccctgtctctactaaaaatacaaaaattagccaggcatggtggcacacgtgtaatccccgctactcaggaagctgaggcaggagaatcgcttgaacccaggaggtggagtttgcagtgagatgagatcgcaccacttcactccagcctgggtaacagagtgagactccgtctcaaaaaaaaaaaaaaaaaaatttaaaaagctaggcgtggtggctcacgcctgtaaccccagcactttgggaggccaaggtgggaggattgcttgagctcaggagttcatgaccagcctgagcaacatagcaagaccctgtctctgtttaaaaaaaaaaaagaaaggccgggtgcagtggctcacgcctgtaatcccagcactttgggaggctgaggcgggcagatcacaaggtcaggtgatcaagaccatcctggctaacacagtgaaatcccgtctctactaaaaaatacaaaaaattagccgggcgtggtggcggttgcctgtagtcccagctactcgggagactgaggcaggagaatggcgtgaacccaggaggtggagcttgcagtgagccgagattgcgccactgcactccagcctgggcgacagagcgagattccatctcaaaaaaaaaaaaaaaaaatgaaggaggctgggcgtggtggtggcttacgcctgtaatcccagcactttgggagcccaaggtgggaggattacttgagcccaggagtttgagaccagctaggcaatgtagtgagaccctttctctacaaaaaaaaaaaaaaaatttagccaggtgccgtgcatgcctgtggtcccagctacttggaaggctgaggtgggaggatcacttgagcctgagagatggagactgcagtgagccatgattataccactgcactccagcagcctgggcaagaaagcaagaccttgtctccaaaaaaaaaaaaaggcatgaggatgaattcaataaattcaagaatattctgtgtactaccttgaccaaattgtattaatatttagagaatattataccaaacaactacaccgtgtacttgaatttctagcgtacgtacaatgtggatcgagataccctgcaccattctaaaaagtcagtacatttcaaagtattgaaattatatgaccacaaaggagttaaaaatcattaacagtaagctgccccccaaaaagcccaagtacttgggcattaagcaacacacatattctctggatcatagaaaagaaagcacaatggaaataagcaaatatttctaacttaatgacgctcaatatatgaaaatgtgtggcatgcagttaaaacagttcttggagggaaaggtgtacctttaaatgcttgtattagaagataaaggtgggccgggtgcggtggctcacgcctgtaatcccagcactttgggaggccgaggcaggtggatcatgaggtcaggagatcgagaccatcctggctaacatggtgaaaccccatctccactaaaaatacaaaaaattagccatgcatggtggtgggtgcctgtagtcccagctactcaggagtctgaggcaggagaatggcgtgaacctgggaggcagagcttgcagtgagccgagatcacgccattgcactccagcctgggcgacagagcaagactccgtcaaaaaaaaaaaaaaaaaagagggtttaaagttaatgagctgcctgtaatcccagcactttgggaggctgagtcaggaggattgcttgagcccaggagttcaagatcaggctgggtaacataataggaccctgtctctacaatttttttttttttaattagccaggtgtggtggtggacacctgtagtcccagctactcaggaggctgagatgggatgatctcttgagcccagcagggtgaggctgcagtgagtcatgatcatgctgcttcactgtagcctgagcaatagagcaagaccctgtctcaaaaaaaaaatgtttttttgttgttttttttttgagacagagtctcgctctgttgcccaggctggagtgcagtggcatgatctcagctcactgcaagctctccttcccgggttcacgccattctccagcctcagcctcccgagtagctgggactacaggcacccactaccacatctggctaattaaaaaaaatttttttttaataaaaagagtttatataagcatccatcttaagaagctattaatacaaatttctgctggtgaagtttaaatttaaaaacaaaacatgagctaggaaaagaagagccaattgaacataaggtaaccagaaaaaagaaaagaataaagtcaagtcaaaaggcaataaaatagaaaataaaacaacaaatccaaactgtggcactttgaaaagatcaataacaatgattagctcctaggaagaccgataagagacaaggagacttcactaatttatgtgtcaggaatgaaagaaggaacatcactacagaccctacagacattaaaaggatagtaaggggatataaataactttacaccaatacatttgacaactctgatgaaatgagcaaattccttgaagatacaagcatgccaattgcaataaaggaatattacagggcactgtgggagaatttagctaggggattgttctaagtccagaggggcctggaaagttttcccagaagtgctatttaaactgagacctgaaggagaagcaggatttgaccaggttgacagaattgtgttccaggccagggaaatagtgtgtgcaaaggccctgaggttggattgaactttctgtgtccaaagaaaaaagtttactctaatgacgcattttggtgtttgatgaccacatgccacatccttcttgggtccaaacccccaagcaaacctgactggcttgaacagaaatgtttaaaaagataaatgcaaacccagtagtaagagaaacttggaagtttctgggctgtaaacaggaggcagtttatcctgtgaactatatcacaaactatatccagaattgatctggaactggtattccctttcatgtggctgatcaaacttctgagtctttttcctccctgtaactttaccttgtgagcatgcactacccactaggcgttgcatttcctactacaagttctttgaatctaatgtccactgctctttttttttttttttttttttgagatggaatttcactcttgttgcccaggctggagtgcaatggcgcgatctcaactcaccacaatctccatctcctgggttcaagtgattctcctgcctcagcctcccgagtagctgggattacaggcgtgtgccaccacgcccggctaattttttgtatatagtagagacggggtttcaccacgttggcctggtctcgaactcctgacctcaggtgatctgcccacctcagcctcccaaagtgctgggattacaggcgtgagccaccacgtctggcctaatgtctactactcttagccccattctgcagagcagtatactgaagcctcaaaggaggtaagccatgcctgaggtcacagaggccaagccctaaccaccatgtcctcccactcctgcccatatttgtttaaatgttggtgctggttaggctatggtttgtgtcttgggcatgggtttccaaacatcccactgctgtcaccctgtctcattcccaggagttctcttagaaggagagacaaaaggctgggcacggtggctcacgcctgaaatcccagcactttgggaggctggggcgggcagataatgaggtcaagagatcgagaccatcctggccaacacagcaaaaccccgtctctactaaaaatacaaaaattagctgtgcatgatggctcctgcctgtagtcccagctactcaggaggctgaggcaggagaatcactcgaacctgggaggtggaggctgcagtgagccgagatcgctccactgcactccagcctgggcaacagagcaagactctgtctcaaaaaataaaaataaaaaaagaggaaaaaattgtgaaaaccacctaaacatctcatccatttttttcccctctaatctgcagaaccgcaaccagagaggtgcgcgggtctgatgtgtgtttggggaaggggtggggaggggagagagtccctttcagtgcccaagcctgtgtgtgcaacttcctgccagtgaggaaactctcagctcgagaatcagccctggttctcctttccccgatctggcctcacaggaggagttggcggggagccttgggcccctctggcctcagccggatttcccagccaaacgcagagagagatgccctggaccatcttgctctttgcagctggtgagtctgaagcccccctctcagatcccccacgcctttccccccatcctctgtccaccttgccgctccaggggcagaaaccagtgcaggggctgccgttctcagggcatcgaggaggctgagcccttggcagatgggttttccccctgagccttggaaactctccagtagtgttggttttttcttcttaggctcctcatcacccccaagtttatgaatatcagaaatatcacccctctggagtcagctgtgcccacaccccatgattcagccccgcttcgtctctgaaggctccttgagtgctggggcagcaggagggtctacctagggggatatcagtgtggcaggggtgggtgggggttggaggctggacgagggagggtttgtatagacctcacctggccagacactctgctcagaagcctgtgggcaatcaggagagagatggatccccaggagaccatcctgcaggaagccgtgctccaaaatccgtattcttcacccaagcctgggaaaggagataaaagtcctctgcccttccttctcctgccctccctctcactcaccccctccccttcctgccacccacctcactcaccccctccctcctgccatgatggcctccttgctgctccttttttaatatttatttttatttttaaatagagacagggtctcactgtgttctccaggctagtctcaaattcctgggctcaagcagtcctcccaccttggcctcccaaagtgctgggattacaggcgtgagccactgcatcaggtgtttgctcctccttaaacacccccattccccttccatcccctggacctttgcctatgctgttccctctgttggaatgcccttccccagctctccaaatgggtccttcctcaccactcaggactcagctcgtgggaggccaaggtgggaggatcacttgaggtgaggatctgggcaacatagtgagatcccatctctacacaaaataagcaaaattagctagccaggttcaccagcctggccaacatggtgaaaccccgtctctactaaaaatataaaaattagccaggcatggtggcacatagtcccaggtactcaggaggctgaggccactgtactccagcctgggcgacaaagcaagattttgtctctaaataaataaataaagtaataataaattaaataaaaaataagagtatagttgtgttgctatgtaataaccaatgctattattgaaaactgatggccaggcatggtagctcacgcctataatcccagcactttgggaggccgaggtggggggagtcacacgaggccaggagttcgagaccagtctggccaatatagtgaaaccccatctctactaaaaatataaaaattggccaggcatagtgccacatgcctgtaatcctagctacttgggaggctggagaatcacttgaacccgggaggtggaggctgtagtgagccgagatcacaccactacattccatcctgggtggcagagtgagactccgactcacaaaaaaaagaaaaaagaaaagtaattcaactacagggagccgtcaccatgtgccaggcagtgtggggtagggtcactagcctcctgactcacagaaaacacaaggctgagggagggtggtctacttgcccgaggccacatagccagggcagcctccactctcaccacgcacccacccaccttaccctctgcattgcaggctccttggcgatcccagcaccatccatccggctggtgcccccgtacccaagcagccaagaggaccccatccacatcgcatgcatggcccctgggaacttcccgggggcgaatttcacactgtatcgaggggggcaggtggtccagctcctgcaggcccccacggaccagcgcggggtgacatttaacctgagcggcggcagcagcaaggctccagggggacccttccactgccagtatggagtgttaggtgagctcaaccagtcccagctgtcagacctcagcgagcccgtgaacgtctccttcccaggtaaggcccttctatgggatctcactgccgggggcttaattttctcacatggacctcttgtgtgtactgttgactcagaggccttcccagaaaaagccaggcttacaccctgccaggacttactcgcctttcctttttcaatcttctcagccagcccaaaaggggatttgttggttcactgagcttaagtcagctcacagggccgacttcaggtatggctagatccaggtgctgaaagctgtcagggaccatttgccccatctctgctccacattcttctccgtcttattgtcaggcagcccgtctccctcttggtgccaaaattggtgctgtgattcttcccattttgcagataaggaaactgaggcacaggaggtacacaccttgtacacaggtaacaggtagccagtctgggatgccattgccttccaaaaaccatgaattacacctccgtgacatacattacttcccctcttggccacatactttttttgtttgtttgctttgagatagttatgctcttgttgcccaggctggagtgcagtggcacgatcttggctcactgcagcctctgcctcctggttcaagcgattcttctgcctcagcctcctgagtatctgggattacaggtgtgtgccaccatgcccggctaatttttgtatttttagtaaagacaggatttcaccatgttggccaggccagtctcgaacccctgacctcatgatccgcctacctcagcctcccaaagtgctggaattacaggcatgagccactgcacctggcttttttttttttttaaatgagacaaggtcgtgcagactagagggcaatggcacaatcatagctcacttcatcctccaattcctatcctcaagtgatcctcccacctcagcctcctaagtagctgagactacaggtgtgcaccaccatgcccagctaatttaaaaaattattttagagatgagggtctaaaatgttgaccagggccggacatggtagctcatgcttgtaatcccagtactttgggaagctgaggtaggtggatcacctgaggtcagagcttaagaccagcctggccaacatggtgaaaccctatgtctattaaaaatacaaaaaataggctgggcgtggtggctcacgcctgtaatcccagcactttgggaggccgaggcgggtggatcatgaggtcaggagattgagaccatcctggctaacaaggtgaaaccccgtctctactaaaaatacaaaaaattagccgggcgcggtggcgggcacctgtagtcccagctactcgggaggctgaggcaggagaatggcgtgaacccgggaagcagagcttgcagtgagccgagattgcgccactgcagtccgcagtccggcctgggcgacagagcgagactccgtctcaaaaaaaaaaaaaaaaaaaatacaaaaaatagctgggtgtggtggcatgcgtgtgtaatcccagctactcaggaggctgaggcaggaggatcatttgaatctgggaggcggaggttacagtgagccaagacagtgccattgcactccagcatgggtgacagagcaagattctgtctcaaaaaaaaaaaagatattgaccaggctagtcttgaactcttaacctcaagtgatcctcccacctcggcctccagagtagctgggattacagatgtgagtcaccatgcccagcatgagccacataaggtttctgagcacttactatggaccaagaactgtctttgggcttgcccaaagacattccaggctgacattccaggcggatgaggacagatgataaacatgaaatccaatatatattcaacctgccagcagggcaccagatgaaatccacctgggtgaggatgtcattatttgaagtagagtagggcgactggccccatgttctaatggtcagccctctggactctgaagtagagtagggcaatcagggaagccctctctgaggaggtggcatttgagcaaaaaactgaatgatgaggaggagccaatcatgtggatatccagggcatgtgttgcaggcagaggatacaggatgtgcaaaggccccgaggctgaagcttccctggtgtgtctgaggagcccagtatggctgaaggatggtgaacaaggaggaaaatggggagaggcggggcagggagttcaccaggaggatcgtggggggtcttgtagaccacagcaaggattcgatcttttcacctgagtgagggaaccctggcagggctgatgtccttttctgatctctgaatgaggaggctggacatgggttatgggtcaagaagcaggagggaggagcctttggtggccttctgtgttaccatcagtcagaactttcctggccgggtgcaatgacccacgcctataagcccaggactttgggaggctgaggcaggacgattccttgagccaaggagttcaagatcagcctgggcaacatagtgagaccctgtctctacaaaaaaaaaaaaaaattattttattttttttttagataggggtcttgctttgttgaccaggctagagtgcagtggcgcaatcacagctcactgcagcctccacttcctgggctcaatcaatcttcccttctcagtctccctagcagctgggactacagccgtgcaccaccacgcctggctaatatgtctattttttgtaaagacagggactcactctgtcgcccaggctggagtgcagtggtgtgaccccagctcactgcaatctctacctccgaggttcaagcaattctcctgcctcagcctctcgagtctcactgcaacctctacctccgaggttcaagcaattctcctgcctcagcctcccgagtagctgggattacaggcgtgcaccaccatgcccagctactttttgagttttagtagagatggggtttcacaatgctggccaggctgctctcaaactcctgacctcaggtgttctgcctgcctcggcctcacaaagtgctggaattacaggcgtgagccaccatgcccagctccccccaattttttttttttttttgagacagtctcggtctgtcgcccaggctggagtacagtggcacgatctcggctcactgcaacctctgcctcccgggttcaagcgattctcctgcctcagagcctcccgagtagctgggactacaggcatgtgccaccatgcccagctaattttttgtatttttttttttagtaagaaggggtttcacagtgttagccaggatgatctcaatctcctgatcttgtgatccgcccacctcagcctcccaaagtgctgagattacaggcgtgagctaccccgtccggctaatgtttttttttttttttttttaattaggagggactgctggcatgtgtcagtaggctgaggcaggtggatcacttaagccggggaggtagaggatatagtgagccatgatcgcaccactgcattccagcctgggtgacagagggagaccctgtctgtaaaaacttttttttttttttaatttttgagacagagtctcactctgtcgcccaggctgaagtgcagtggcccaatctcggctcactgcaacctttgcctcccaggctcaagcgattctcgtgcctcagcctcccgagtagctgggactacaggcgccaaccaccacaccctgctaatttttgtattttttagtagagatggggtttcaccatgttggccagggtggtcttcaactcctgacctcaagtgatccgcccacatcggcctcccaaagtgctgggattacagccatgagccaccgcgcctggcccaaaaaaacttttaaaaagaactttttcactgcaaaaaataatcttgttgccagccgaggccaacatgcagctatgacagggcagttctctgtccttcccggcctcaggctcctctatcaaaggcccccttctctcaccttggccttgtggccttggagtagggagctgacaacaccccttctgccccaggtgaatcaatgaacaaggctgacattgtgagaataccaagcgtctgtcttcttccctcttctggcttagctcctcacctcccttggggtcagggcatctcctctttctccaggaaggggaagcgaagtcttgtgctgagaaggtgactctggaactgccactcccatgcctgtgtgactagcttctgggtggatctcagggtctaccgttgggctgggggtggatgtcatctggccactggcacccagactgcaagtaataaaaacctgactcacactggctctaccagcaagaggggatttgttggttcactgagctgaagtcagtttacatggctgacttcagatatggctggatccaggtgctgaaaaatgacagaaagcatttgccttctcagctcctcttctgtcttattctcaggtagtttctccccctcatggaggcaagattgtgccctgaagcttcagatatatattctttttttttttttttttttttttttgagacagattctagctgtgtcacccagactggaaggcaatggcccaatctcggctcactg
